(19) United States
(12) Patent Application Publication
(10) Pub. No.: US 2015/0231219 A1
(43) Pub. Date: Aug. 20, 2015

(54) DOSAGE AND ADMINISTRATION OF MONOSPECIFIC AND BISPECIFIC ANTI-IGR-1R AND ANTI-ERBB3 ANTIBODIES

(71) Applicant: Merrimack Pharmaceuticals, Inc., Cambridge, MA (US)

(72) Inventors: Alexey Alexandrovich Lugovskoy, Woburn, MA (US); Jason Baum, Needham, MA (US); Sharlene Adams, Waltham, MA (US); Bryan Johnson, Natick, MA (US); Jian Tang, Newton, MA (US)

(21) Appl. No.: 14/388,330

(22) PCT Filed: Apr. 2, 2013
(86) PCT No.: PCT/US2013/035013

§ 371 Date: Sep. 26, 2014

Related U.S. Application Data
(60) Provisional application No. 61/619,258, filed on Apr. 2, 2012.
(60) Provisional application No. 61/723,582, filed on Nov. 7, 2012.

(51) Int. Cl. A61K 39/00; C07K 16/40; A61K 31/436; A61K 31/138; A61K 31/5685; A61K 31/4745; A61K 31/565; A61K 31/337; A61K 31/44; A61K 31/437; A61K 31/506; C07K 16/28; A61K 31/4196

(52) U.S. Cl. CPC A61K 39/0011; C07K 16/2863; C07K 16/40; A61K 31/436; A61K 31/138; A61K 31/5685; A61K 31/4196; A61K 31/565; A61K 31/337; A61K 31/44; A61K 31/437; A61K 31/506; A61K 31/4745; A61K 2039/545; C07K 2317/31; A61K 2039/505

(57) ABSTRACT

Provided are methods for the administration of therapeutic bispecific anti-IGF-1R and anti-ErbB3 antibodies, either alone or in combination with other anti-cancer therapeutics.

### RELATED APPLICATIONS

[0001] This application claims priority to U.S. Provisional Application Ser. No. 61/619,258, filed Apr. 2, 2012, and U.S. Provisional Application Ser. No. 61/723,582 filed Nov. 7, 2012. The contents of both applications are incorporated herein by reference in their entirety.

### FIELD OF THE INVENTION

[0002] Provided are methods for the administration of therapeutic bispecific anti-IGF-1R and anti-ErbB3 antibodies, either alone or in combination with other anti-cancer therapeutics.

### BACKGROUND OF THE INVENTION

[0003] Tumor cells express receptors for growth factors and cytokines that stimulate proliferation of the cells. Antibodies to such receptors can be effective in blocking the stimulation of cell proliferation mediated by growth factors and cytokines and can thereby inhibit tumor cell proliferation and tumor growth. Commercially available therapeutic antibodies that target receptors on cancer cells include, for example, trastuzumab which targets the HER2 receptor (also known as ErbB2) for the treatment of breast cancer, and cetuximab which targets the epidermal growth factor receptor (EGFR, also known as HER1 or ErbB1) for the treatment of colorectal cancer and head and neck cancer.

[0004] Monoclonal antibodies have significantly advanced our ability to treat cancers, yet clinical studies have shown that many patients do not adequately respond to monospecific therapy. This is in part due to the multigenic nature of cancers, where cancer cells rely on multiple and often redundant pathways for proliferation. Bi- or multi-specific antibodies capable of blocking multiple growth and survival pathways at once have a potential to better meet the challenge of blocking cancer growth, and indeed many of them are advancing in clinical development. In addition, in the treatment of cancers, the co-administration of pluralities of anti-cancer drugs (combination therapy) often provides better treatment outcomes than monotherapy.

### SUMMARY

[0005] A number of isolated polyvalent bispecific antibodies (PBA), are described in co-pending U.S. patent application 61/558,192. These antibodies bind specifically to human IGF-1R and to human ErbB3. These proteins are potent inhibitors of tumor cell proliferation and of signal transduction through either or both of IGF-1R and ErbB3.

[0006] Monotherapy with a bispecific anti-IGF-1R and anti-ErbB3 antibody suppresses tumor growth in a dose-dependent manner in in vivo xenograft models of a variety of cancers including pancreatic cancer, renal cell carcinoma, Ewing's sarcoma, non-small cell lung cancer, gastrointestinal neuroendocrine cancer, estrogen receptor positive locally advanced or metastatic cancer, ovarian cancer, colorectal cancer, endometrial cancer, or glioblastoma. It has now been discovered that co-administration of a bispecific anti-IGF-1R and anti-ErbB3 antibody with one or more additional anti-cancer agents, such as everolimus, capecitabine, or XL147, exhibits therapeutic synergy.

[0007] Accordingly, provided are methods for the treatment of a cancer in a human patient by administering an effective amount of a bispecific anti-IGF-1R and anti-ErbB3 antibody to the patient, where the patient is given a single loading dose of at least 10 mg/kg of the bispecific antibody followed administration of one or more maintenance doses given at intervals. The intervals between doses are intervals of at least three days. In some embodiments, the intervals are every seven days, every fourteen days or every twenty-one days.

[0008] The doses administered may range from 1 mg/kg to 60 mg/kg of the bispecific antibody. In some embodiments, the loading dose is greater than the maintenance dose. The loading dose may from 12 mg/kg to 20 mg/kg, from 20 mg/kg to 40 mg/kg, or from 40 mg/kg to 60 mg/kg. In some embodiments the loading dose is about 12 mg/kg, 20 mg/kg, 40 mg/kg, or 60 mg/kg. In other embodiments the maintenance dose is about 6 mg/kg, 12 mg/kg, 20 mg/kg, 30 mg/kg, 40 mg/kg, 50 mg/kg or 60 mg/kg.

[0009] In some embodiments the patient has a pancreatic cancer, renal cell carcinoma, hepatocellular carcinoma, Ewing's sarcoma, non-small cell lung cancer, gastrointestinal neuroendocrine cancer, estrogen receptor- or progesterone receptor-positive locally advanced or metastatic breast cancer, ovarian cancer, triple negative breast cancer, colorectal cancer, endometrial cancer, or glioblastoma. In one embodiment, the patient has a cancer that is refractory to one or more anti-cancer agents, e.g., gemcitabine or sunitinib.

[0010] In one embodiment the bispecific anti-IGF-1R and anti-ErbB3 antibody has an anti-IGF-1R module selected from the group consisting of SF, P4, M78, and M57. In another embodiment the bispecific anti-IGF-1R and anti-ErbB3 antibody has an anti-ErbB3 module selected from the group consisting of C8, P1, M1.3, M27, P6, and B69. In one embodiment, the bispecific anti-IGF-1R and anti-ErbB3 antibody is P4-G1-M1.3. In another embodiment, the bispecific anti-IGF-1R and anti-ErbB3 antibody is P4-G1-C8.

[0011] Also provided are methods of providing treatment of cancer in a human patient comprising co-administering to the patient an effective amount each of a bispecific anti-IGF-1R and anti-ErbB3 antibody and of one or more additional anti-cancer agents, wherein the anti-cancer agent is a PI3K pathway inhibitor, an mTOR inhibitor, a MEK inhibitor, a multikinase inhibitor, a B-Raf inhibitor, a taxane, irinotecan, nanoliposomal irinotecan, an anti-endocrine therapy, an antihormonal therapy, or an antimetabolite therapy. In some embodiments the anti-cancer agent is an mTOR inhibitor. Exemplary mTOR inhibitors are selected from the group comprising everolimus, temsirolimus, sirolimus, or ridaforolimus. In other embodiments the mTOR inhibitor is a pan-mTOR inhibitor selected from the group consisting of INK128, CC223, OSI207, AZD8055, AZD2014, and Palomid529. In some embodiments the anti-cancer agent is a phosphoinositide-3-kinase (PI3K) inhibitor or PI3K pathway inhibitor, e.g., perifosine (KRX-0401), SF1126, CAL101, BKM120, BKM120, XL147, or PX-866. In one embodiment, the PI3K inhibitor is XL147 or BKM120. In some embodiments, the anti-cancer agent is a MEK inhibitor, e.g., GSK1120212. In some embodiments, the anti-cancer agent is a multikinase inhibitor. In certain embodiments, the multikinase inhibitor is sorafenib. In some embodiments the anti-cancer agent is an antimetabolite therapy, e.g., gemcitabine, capecitabine, cytarabine, or 5-fluorouracil. In certain embodiments, the antimetabolite is gemcitabine. In other embodiments, the antimetabolite is a taxane such as docetaxel, cabazitaxel, nab-paclitaxel, or paclitaxel. In another embodiment, the antimetabolite is capecitabine or 5-fluorouracil. In some embodiments, the anti-cancer agent is irinotecan or nanoliposomal irinotecan. In another embodiment, the anti-cancer agent is a B-Raf inhibitor. In some embodiments, the anti-cancer agent is antihormonal therapy. In certain embodiments, then antihormonal therapy is tamoxifen, exemestane, letrozole, or fulvestrant.

[0012] In some embodiments, co-administration of the additional anti-cancer agent or agents has an additive or superadditive effect on suppressing tumor growth, as compared to administration of the bispecific anti-IGF-1R and anti-ErbB3 antibody alone or the one or more additional anti-cancer agents alone, wherein the effect on suppressing tumor growth is measured in a mouse xenograft model using BxPC-3, Caki-1, SK-ES-1, A549, NCI/ADR-RES, BT-474, DU145, or MCF7 cells.

[0013] Also provided are compositions for use in the treatment of a cancer, or for the manufacture of a medicament for the treatment of cancer, said composition comprising a bispecific anti-IGF-1R and anti-ErbB3 antibody to be administered to a patient requiring treatment of a cancer, the administration comprising administering to the patient a single loading dose of at least 10 mg/kg of the bispecific antibody followed by administration of one or more maintenance doses given at intervals. The intervals between doses are intervals of at least three days. In some embodiments, the intervals between doses are every fourteen days or every twenty-one days.

[0014] In some embodiments, the compositions comprise a loading dose that is greater than the maintenance dose. The loading dose may from about 12 mg/kg to about 20 mg/kg, from about 20 mg/kg to about 40 mg/kg, or from about 40 mg/kg to about 60 mg/kg. In some embodiments the loading dose is about 12 mg/kg, about 20 mg/kg, about 40 mg/kg, or about 60 mg/kg. In certain embodiments the maintenance dose is about 6 mg/kg, about 12 mg/kg, about 20 mg/kg, about 30 mg/kg, about 40 mg/kg, about 50 mg/kg or about 60 mg/kg. In one embodiment, the patient has a cancer that is refractory to one or more anti-cancer agents, e.g., gemcitabine, sunitinib, or sorafenib.

[0015] In some embodiments the patient has a pancreatic cancer, renal cell carcinoma, hepatocellular carcinoma, Ewing's sarcoma, non-small cell lung cancer, gastrointestinal neuroendocrine cancer, estrogen receptor-positive locally advanced or metastatic cancer, ovarian cancer, colorectal cancer, endometrial cancer, or glioblastoma.

[0016] In one embodiment the bispecific anti-IGF-1R and anti-ErbB3 antibody has an anti-IGF-1R module selected from the group consisting of SF, P4, M78, and M57. In another embodiment the bispecific anti-IGF-1R and anti-ErbB3 antibody has an anti-ErbB3 module selected from the group consisting of C8, P1, M1.3, M27, P6, and B69. In one embodiment, the bispecific anti-IGF-1R and anti-ErbB3 antibody is P4-G1-M1.3. In another embodiment, the bispecific anti-IGF-1R and anti-ErbB3 antibody is P4-G1-C8.

[0017] In some embodiments the compositions comprise an effective amount each of a bispecific anti-IGF-1R and anti-ErbB3 antibody and of one or more additional anti-cancer agents, wherein the anti-cancer agent is a PI3K pathway inhibitor, an mTOR inhibitor, a MEK inhibitor, a multikinase inhibitor, a B-Raf inhibitor, nanoliposomal irinotecan, or an antimetabolite. In some embodiments the anti-cancer agent is an mTOR inhibitor. In certain embodiments, the mTOR inhibitor is selected from the group comprising everolimus, temsirolimus, sirolimus, or ridaforolimus. In other embodiments the mTOR inhibitor is a pan-mTOR inhibitor chosen from the group consisting of INK128, CC223, OSI207, AZD8055, AZD2014, and Palomid529. In some embodiments the anti-cancer agent is a phosphoinositide-3-kinase (PI3K) inhibitor, e.g., perifosine (KRX-0401), SF1126, CAL101, BKM120, BKM120, XL147, or PX-866. In one embodiment, the PI3K inhibitor is XL147. In some embodiments, the anti-cancer agent is a MEK inhibitor. Exemplary MEK inhibitors are selected from the group consisting of GSK1120212, BAY 86-9766, or AZD6244. In some embodiments, the anti-cancer agent is a multikinase inhibitor. In certain embodiments, the multikinase inhibitor is sorafenib or sunitinub. In some embodiments the anti-cancer agent is an antimetabolite, e.g., gemcitabine, docetaxel, paclitaxel, capecitabine, cytarabine, or 5-fluorouracil. In one embodiment, the anti-cancer agent is nanoliposomal irinotecan. In another embodiment, the anti-cancer agent is a B-Raf inhibitor.

[0018] In some embodiments the composition comprises a bispecific anti-IGF-1R and anti-ErbB3 antibody and one or more additional anti-cancer agents, wherein co-administration of the anti-cancer agent or agents has an additive or superadditive effect on suppressing tumor growth, as compared to administration of the bispecific anti-IGF-1R and anti-ErbB3 antibody alone or the one or more additional anti-cancer agents alone, wherein the effect on suppressing tumor growth is measured in a mouse xenograft model using BxPC-3, Caki-1, SK-ES-1, A549, NCI/ADR-RES, BT-474, DU145, or MCF7 cells.

[0019] Also provided are kits comprising a therapeutically effective amount of a bispecific anti-IGF-1R and anti-ErbB3 antibody and a pharmaceutically-acceptable carrier. The kits further comprise instructions to a practitioner, wherein the instructions comprise dosages and administration schedules for the bispecific anti-IGF-1R and anti-ErbB3 antibody. In one embodiment, the kit includes multiple packages each containing a single dose amount of the antibody. In another embodiment, the kit provides infusion devices for administration of the bispecific anti-IGF-1R and anti-ErbB3 antibody. In another embodiment, the kit further comprises an effective amount of at least one additional anti-cancer agent.

### BRIEF DESCRIPTION OF THE DRAWINGS

[0020] FIG. 1 is a graph demonstrating the inhibition of growth of Caki-1 renal cell carcinoma cancer cells in vivo by P4-G1-M1.3 (500 μg, 300 μg, or 100 μg) the mTOR inhibitor (mTORi) everolimus (30 mpk or 3 mpk), or the combination of everolimus (3 mpk) and P4-G1-M1.3 (500 μg). The y-axis represents mean tumor volume in mm³ and the x-axis represents time in days.

[0021] FIGS. 2 A-J are graphs demonstrating the level of IGF-1R and insulin receptor (FIG. 2A), EGFR and ErbB3 (FIG. 2B), ErbB2 (FIG. 2C), phospho-AKT (pAKT, Ser473 and Thr308) (FIG. 2D), phospho-Fox01 (Thr24)/Fox03a (Thr32) and phospho-PDK1 (pPDK1) (FIG. 2E), phospho-mTOR (p-mTOR) Ser2448 and Ser2481 (FIG. 2F), pS6 (Ser235/236 and Ser240/244)(FIG. 2G), phospho-ERK (p-ERK) and survivin (FIG. 2H), phospho-PRAS40 (Ser183 and Thr246)(FIG. 2I), phospho-4E-BP1p4E-BP1) (Thr37/46 and Ser65) (FIG. 2J), in end of study BxPC-3 tumors of mice in which one of PBS, P4-G1-M1.3, gemcitabine, or P4-G1-M1.3+gemcitabine (combined individual doses) was administered.

[0022] FIGS. 3 A-D are graphs demonstrating the level of pAkt Ser473 (FIG. 3A, B) and pERK (FIG. 3C, D) in BxPC-3 cells (FIG. 3A, C) wild-type for KRAS or KP4 cells (FIG. 3B, D) mutant for KRAS. Cells were treated with 500 nM P4-G1-M1.3, 250 nM GSK1120212 or the combination for 24 hours in 10% serum and ELISA assays were performed. The data was normalized to 10% serum without treatment.

[0023] FIG. 4 is a graph that demonstrates the inhibition of growth of DU145 prostate cancer cells in vivo by P4-G1-M1.3 alone (30 mpk, q3d), docetaxel alone (10 mpk q7d), or the combination of docetaxel and P4-G1-M1.3. The y-axis represents mean tumor volume in mm³ and the x-axis represents time in days.

[0024] FIGS. 5 A-D are graphs that demonstrate the level of ErbB3 (FIG. 5A), pErbB3 (FIG. 5B), pAkt Ser473 (FIG. 5C) and pERK1/2 (FIG. 5D) in HepG2 hepatocellular carcinoma cells. Cells were treated with 500 nM P4-G1-M1.3, 5 μM sorafenib or the combination for either 2 hours or 6 hours and quantitative western blotting was performed.

[0025] FIG. 6 is a graph that represents the in vivo effects of P4-G1-M1.3 alone, docetaxel alone, or the combination of P4-G1-M1.3 and docetaxel on total IGF-1R in DU145 xenografts. Statistical significance across groups was determined using the student's T-test (*,p<0.05 vs control.; #,p<0.05 vs Docetaxel; a,p<0.05 vs P4-G1-M1.3).

[0026] FIG. 7 is a graph that represents the in vivo effects of P4-G1-M1.3 alone, docetaxel alone, or the combination of P4-G1-M1.3 and docetaxel on total ErbB3 in DU145 xenografts. Statistical significance across groups was determined using the student's T-test (*, p<0.05 vs control; #,p<0.05 vs Docetaxel; a,p<0.05 vs P4-G1-M1.3).

### DETAILED DESCRIPTION

### Methods and Compositions

[0027] Methods of monotherapy, combination therapy, monotherapeutic compositions, and combination compositions for treating cancer in a patient are provided. In these methods, the cancer patient is treated with both a bispecific anti-IGF-1R and anti-ErbB3 antibody and one or more additional anti-cancer agents selected, e.g., from an mTOR inhibitor, a MEK inhibitor, a multikinase inhibitor, a B-Raf inhibitor, nanoliposomal irinotecan, a PI3K inhibitor, and an antimetabolite.

[0028] The term “combinatorially enhanced” means that combination therapy with an effective amount of a first agent and an effective amount of a second agent provides a benefit that is greater than the benefit obtained in two matched comparisons: one in which the same effective amount of the first agent alone is separately administered as monotherapy to separate matched subjects and the other in which the same effective amount of the second agent alone is separately administered as monotherapy to separate matched subjects. Such a greater benefit may be seen in patients treated with the combination therapy as an improved therapeutic outcome compared to either of the monotherapy comparators, or as a therapeutic outcome that is equal to or better than that of either of the monotherapy comparators and is associated in the combination therapy with a reduction of adverse events as compared to the adverse events seen with either of the monotherapy comparators. An exemplary combinatorially enhanced outcome is one in which the greater benefit is a statistically significantly greater benefit with a p value of 0.05 or better, and each combinatorially enhanced outcome recited in the examples optionally corresponds to a statistically significantly greater benefit with a p value less than or equal to 0.05.

[0029] The terms “combination therapy,” “co-administration,” “co-administered” or “concurrent administration” (or minor variations of these terms) include simultaneous administration of at least two therapeutic agents to a patient or their sequential administration within a time period during which the first administered therapeutic agent is still present in the patient when the second administered therapeutic agent is administered.

[0030] The term “monotherapy” refers to administering a single drug to treat a disease or disorder in the absence of co-administration of any other therapeutic agent that is being administered to treat the same disease or disorder.

[0031] “Additional anti-cancer agent” is used herein to indicate any drug that is useful for the treatment of a malignant pancreatic tumor other than a drug that inhibits heregulin binding to ErbB2/ErbB3 heterodimer.

[0032] “Dosage” refers to parameters for administering a drug in defined quantities per unit time (e.g., per hour, per day, per week, per month, etc.) to a patient. Such parameters include, e.g., the size of each dose. Such parameters also include the configuration of each dose, which may be administered as one or more units, e.g., taken at a single administration, e.g., orally (e.g., as one, two, three or more pills, capsules, etc.) or injected (e.g., as a bolus). Dosage sizes may also relate to doses that are administered continuously (e.g., as an intravenous infusion over a period of minutes or hours). Such parameters further include frequency of administration of separate doses, which frequency may change over time.

[0033] “Dose” refers to an amount of a drug given in a single administration.

[0034] “Effective amount” refers to an amount (administered in one or more doses) of an antibody, protein or additional therapeutic agent, which amount is sufficient to provide effective treatment.

[0035] “ErbB3” and “HERS” refer to ErbB3 protein, as described in U.S. Pat. No. 5,480,968. The human ErbB3 protein sequence is shown in SEQ ID NO:4 of U.S. Pat. No. 5,480,968, wherein the first 19 amino acids (aas) correspond to the leader sequence that is cleaved from the mature protein. ErbB3 is a member of the ErbB family of receptors, other members of which include ErbB1 (EGFR), ErbB2 (HER2/Neu) and ErbB4. While ErbB3 itself lacks tyrosine kinase activity, it can be phosphorylated upon dimerization with another ErbB family receptor, e.g., ErbB1, ErbB2 and ErbB4, which are receptor tyrosine kinases. Ligands for the ErbB family include heregulin (HRG), betacellulin (BTC), epidermal growth factor (EGF), heparin-binding epidermal growth factor (HB-EGF), transforming growth factor alpha (TGF-α), amphiregulin (AR), epigen (EPG) and epiregulin (EPR). The aa sequence of human ErbB3 is provided at Genbank Accession No. NP_{—}001973.2 (receptor tyrosine-protein kinase erbB-3 isoform 1 precursor) and is assigned Gene ID: 2065.

[0036] “IGF-1R” or “IGF1R” refers to the receptor for insulin-like growth factor 1 (IGF-1, formerly known as somatomedin C). IGF-1R also binds to, and is activated by, insulin-like growth factor 2 (IGF-2). IGF1-R is a receptor tyrosine kinase, which upon activation by IGF-1 or IGF-2 is auto-phosphorylated. The aa sequence of the human IGF-1R precursor is provided at Genbank Accession No. NP_{—}000866 and is assigned Gene ID: 3480.

[0037] “Module” refers to a structurally and/or functionally distinct part of a PBA, such a binding site (e.g., an scFv domain or a Fab domain) and the Ig constant domain. Modules provided herein can be rearranged (by recombining sequences encoding them, either by recombining nucleic acids or by complete or fractional de novo synthesis of new polynucleotides) in numerous combinations with other modules to produce a wide variety of PBAs, e.g., as disclosed herein. For example, an “SF” module refers to the binding site “SF,” i.e., comprising at least the CDRs of the SF VH and SF VL domains. A “C8” module refers to the binding site “C8.”

[0038] “PBA” refers to a polyvalent bispecific antibody, an artificial hybrid protein comprising at least two different binding moieties or domains and thus at least two different binding sites (e.g., two different antibody binding sites), wherein one or more of the pluralities of the binding sites are covalently linked, e.g., via peptide bonds, to each other. A preferred PBA described herein is an anti-IGF-1R+anti-ErbB3 PBA, which is a polyvalent bispecific antibody that comprises one or more first binding sites binding specifically to an IGF-1R protein, e.g., a human IGF-1R protein, and one or more second binding sites binding specifically to an ErbB3 protein, e.g., a human ErbB3 protein. An anti-IGF-1R+anti-ErbB3 PBA is so named regardless of the relative orientations of the anti-IGF-1R and anti-ErbB3 binding sites in the molecule, whereas when the PBA name comprises two antigens separated by a slash (/) the antigen to the left of the slash is amino terminal to the antigen to the right of the slash. A PBA may be a bivalent binding protein, a trivalent binding protein, a tetravalent binding protein or a binding protein with more than 4 binding sites. An exemplary PBA is a tetravalent bispecific antibody, i.e., an antibody that has 4 binding sites, but binds to only two different antigens or epitopes. Exemplary bispecific antibodies are tetravalent “anti-IGF-1R/anti-ErbB3” PBAs and “anti-ErbB3/anti-IGF-1R” PBAs. Typically the N-terminal binding sites of a tetravalent PBA are Fabs and the C-terminal binding sites are scFvs. IGF-1R+ErbB3 PBAs comprising IgG1 constant regions each comprise two joined essentially identical subunits, each subunit comprising a heavy and a light chain that are disulfide bonded to each other, e.g., M7-G1-M78 (SEQ ID NO:146 and SEQ ID NO:147), P4-G1-M1.3 (SEQ ID NO:148 and SEQ ID NO:149), and P4-G1-C8 (SEQ ID NO:150 and SEQ ID NO:151), are exemplary embodiments of such IgG1-(scFv)₂ proteins. When the immunoglobulin constant regions are those of IgG2, the protein is referred to as an IgG2-(scFv)₂. Other exemplary IGF-1R+ErbB3 PBAs comprising IgG1 constant regions include, e.g., SF-G1-P1, SF-G1-M1.3, SF-G1-M27, SF-G1-P6, SF-G1-B69, P4-G1-C8, P4-G1-P1, P4-G1-M1.3, P4-G1-M27, P4-G1-P6, P4-G1-B69, M78-G1-C8, M78-G1-P1, M78-G1-M1.3, M78-G1-M27, M78-G1-P6, M78-G1-B69, M57-G1-C8, M57-G1-P1, M57-G1-M1.3, M57-G1-M27, M57-G1-P6, M57-G1-B69, P1-G1-P4, P1-G1-M57, P1-G1-M78, M27-G1-P4, M27-G1-M57, M27-G1-M78, M7-G1-P4, M7-G1-M57, M7-G1-M78, B72-G1-P4, B72-G1-M57, B72-G1-M78, B60-G1-P4, B60-G1-M57, B60-G1-M78, P4M-G1-M1.3, P4M-G1-C8, P33M-G1-M1.3, P33M-G1-C8, P4M-G1-P6L, P33M-G1-P6L, P1-G1-M76 (set forth in the Appendix enclosed herewith, and incorporated by reference herein).

Combination Therapies with Additional Anti-Cancer Agents

[0039] As herein provided, BPAs (e.g., P4-G1-M1.3) are co-administered with one or more additional anti-cancer agents (e.g., an mTOR inhibitor, a MEK inhibitor, a multikinase inhibitor, a B-Raf inhibitor, an anti-endocrine therapy, antihormonal therapy, irinotecan or nanoliposomal irinotecan, a PI3K inhibitor, or an antimetabolite), to provide effective treatment to human patients having a cancer (e.g., pancreatic, ovarian, lung, colon, head and neck, and esophageal cancers).

[0040] Additional anti-cancer agents suitable for combination with anti-IGF-1R+anti-ErbB3 antibodies may include but are not limited to pyrimidine antimetabolites (e.g., the nucleoside metabolic inhibitor gemcitabine, cytarabine, or the pyrimidine analog 5-fluorouracil), mTOR inhibitors (e.g., everolimus, temsirolimus, sirolimus, or ridaforolimus), pan-mTOR inhibitors (e.g., INK128, CC223, OS1207, AZD8055, AZD2014, or Palomid529), phosphoinositide-3-kinase (PI3K) inhibitors (e.g., perifosine (KRX-0401), SF1126, CAL101, BKM120, BKM120, XL147, and PX-866), MEK inhibitors (e.g., GSK1120212, BAY 86-9766 or AZD624), taxanes (e.g., paclitaxel, nab-paclitaxel, cabazitaxel, and docetaxel), and nanoliposomal irinotecan (e.g., MM-398).

[0041] In certain combination therapy methods, one or more of the following therapeutic agents is co-administered to the patient with an anti-IGF-1R+anti-ErbB3 antibody.

[0042] Gemcitabine (Gemzar®) is indicated as first line therapy for pancreatic adenocarcinoma and is also used in various combinations to treat ovarian, breast and non-small-cell lung cancers. Gemcitabine HCl is 2′-deoxy-2′,2′-difluorocytidine monohydrochloride (-isomer) (MW=299.66) and is administered parenterally, typically by i.v. infusion.

[0043] Temsirolimus (Torisel®) is an mTOR inhibitor that is administered parenterally, typically by i.v. infusion and is used to treat advanced renal cell carcinoma.

[0044] Everolimus (Afinitor®), a 40-O-(2-hydroxyethyl) derivative of sirolimus, is an mTOR inhibitor that is administered orally and is used to treat progressive neuroendocrine tumors of pancreatic origin (PNET) in patients with unresectable, locally advanced or metastatic disease.

[0045] 5-Fluorouracil (5-FU Adrucil®, Carac®, Efudix®, Efudex® and Fluoroplex®) is a pyrimidine analog that works through irreversible inhibition of thymidylate synthase.

[0046] Capecitabine (Xeloda®) is an orally administered systemic prodrug of 5′-deoxy-5-fluorouridine (5′-DFUR) which is converted to 5-fluorouracil.

[0047] Docetaxel (Taxotere®) is an anti-mitotic chemotherapy used for the treatment of breast, advanced non-small cell lung, metastatic androgen-independent prostate, advanced gastric and locally advanced head and neck cancers.

[0048] Paclitaxel (Taxol®) is an anti-mitotic chemotherapy used for the treatment of lung, ovarian, breast and head and neck cancers.

[0049] Sorafenib (Nexavar®) is a small molecule inhibitor of multiple tyrosine kinases (including VEGFR and PDGFR) and Raf kinases (an exemplary “multikinase inhibitor”) used for treatment of advanced renal cell carcinoma (RCC) and advanced primary liver cnacer (hepatocellular carcinoma, HCC).

[0050] Trametinib (GSK-1120212) is a small molecule inhibitor of the MEK protein currently in clinical trials for the treatment of several cancers including pancreatic, melanoma, breast and non-small cell lung.

[0051] Vemurafenib (Zelboraf®) is a small molecule inhibitor of B-Raf in patients whose cancer cells harbor a V600E B-Raf mutation. Vemurafenib is currently approved for treatment of late-stage, unresectable, and metastatic melanoma.

[0052] Nanoliposomal irinotecan (e.g., MM-398) is a stable nanoliposomal formulation of irinotecan. MM-398 is described, e.g., in U.S. Pat. No. 8,147,867. MM-398 may be administered, for example, on day 1 of the cycle at a dose of 120 mg/m2, except if the patient is homozygous for allele UGT1A1*, wherein nanoliposomal irinotecan is administered on day 1 of cycle 1 at a dose of 80 mg/m². The required amount of MM-398 may be diluted, e.g., in 500 mL of 5% dextrose injection USP and infused over a 90 minute period.

### Outcomes

[0053] As shown in the Examples herein, co-administration of an anti-IGF-1R+anti-ErbB3 antibody with one or more additional therapeutic agents (e.g., everolimus, temsirolimus, sirolimus, XL147, gemcitabine, 5-fluorouracil, cytarabine) provides improved efficacy compared to treatment with the antibody alone or with the one or more additional therapeutic agents in the absence of antibody therapy. Preferably, a combination of an anti-IGF-1R+anti-ErbB3 antibody with one or more additional therapeutic agents exhibits therapeutic synergy.

[0054] “Therapeutic synergy” refers to a phenomenon where treatment of patients with a combination of therapeutic agents manifests a therapeutically superior outcome to the outcome achieved by each individual constituent of the combination used at its optimum dose (T. H. Corbett et al., 1982, Cancer Treatment Reports, 66, 1187). In this context a therapeutically superior outcome is one in which the patients either a) exhibit fewer incidences of adverse events while receiving a therapeutic benefit that is equal to or greater than that where individual constituents of the combination are each administered as monotherapy at the same dose as in the combination, or b) do not exhibit dose-limiting toxicities while receiving a therapeutic benefit that is greater than that of treatment with each individual constituent of the combination when each constituent is administered in at the same doses in the combination(s) as is administered as individual components. In xenograft models, a combination, used at its maximum tolerated dose, in which each of the constituents will be present at a dose generally not exceeding its individual maximum tolerated dose, manifests therapeutic synergy when decrease in tumor growth achieved by administration of the combination is greater than the value of the decrease in tumor growth of the best constituent when the constituent is administered alone.

[0055] Thus, in combination, the components of such combinations have an additive or superadditive effect on suppressing tumor growth, as compared to monotherapy with the PBA or treatment with the chemotherapeutic(s) in the absence of antibody therapy. By “additive” is meant a result that is greater in extent (e.g., in the degree of reduction of tumor mitotic index or of tumor growth or in the degree of tumor shrinkage or the frequency and/or duration of symptom-free or symptom-reduced periods) than the best separate result achieved by monotherapy with each individual component, while “superadditive” is used to indicate a result that exceeds in extent the sum of such separate results. In one embodiment, the additive effect is measured as slowing or stopping of tumor growth. The additive effect can also be measured as, e.g., reduction in size of a pancreatic tumor, reduction of tumor mitotic index, reduction in number of metastatic lesions over time, increase in overall response rate, or increase in median or overall survival.

[0056] One non-limiting example of a measure by which effectiveness of a therapeutic treatment can be quantified is by calculating the log 10 cell kill, which is determined according to the following equation:

log 10 cell kill=TC(days)/3.32×Td

in which T C represents the delay in growth of the cells, which is the average time, in days, for the tumors of the treated group (T) and the tumors of the control group (C) to have reached a predetermined value (1 g, or 10 mL, for example), and Td represents the time, in days necessary for the volume of the tumor to double in the control animals. When applying this measure, a product is considered to be active if log 10 cell kill is greater than or equal to 0.7 and a product is considered to be very active if log 10 cell kill is greater than 2.8. Using this measure, a combination, used at its own maximum tolerated dose, in which each of the constituents is present at a dose generally less than or equal to its maximum tolerated dose, exhibits therapeutic synergy when the log 10 cell kill is greater than the value of the log 10 cell kill of the best constituent when it is administered alone. In an exemplary case, the log 10 cell kill of the combination exceeds the value of the log 10 cell kill of the best constituent of the combination by at least 0.1 log cell kill, at least 0.5 log cell kill, or at least 1.0 log cell kill.

### Kits and Unit Dosage Forms

[0057] Further provided are kits that include a pharmaceutical composition containing a bispecific anti-IGF-1R and anti-ErbB3 antibody, including a pharmaceutically-acceptable carrier, in a therapeutically effective amount adapted for use in the preceding methods. The kits include instructions to allow a practitioner (e.g., a physician, nurse, or patient) to administer the composition contained therein to treat an ErbB2 expressing cancer.

[0058] Preferably, the kits include multiple packages of the single-dose pharmaceutical composition(s) containing an effective amount of a bispecific anti-IGF-1R and anti-ErbB3 antibody for a single administration in accordance with the methods provided above. Optionally, instruments or devices necessary for administering the pharmaceutical composition(s) may be included in the kits. For instance, a kit may provide one or more pre-filled syringes containing an amount of a bispecific anti-IGF-1R and anti-ErbB3 antibody that is about 100 times the dose in mg/kg indicated for administration in the above methods.

[0059] Furthermore, the kits may also include additional components such as instructions or administration schedules for a patient suffering from a disease or condition (e.g., a cancer, autoimmune disease, or cardiovascular disease) to use the pharmaceutical composition(s) containing a bispecific anti-IGF-1R and anti-ErbB3 antibody, or any binding, diagnostic, and/or therapeutic agent conjugated thereto.

[0060] It will be apparent to those skilled in the art that various modifications and variations can be made in the compositions, methods, and kits of the present invention without departing from the spirit or scope of the invention. Thus, it is intended that the present invention cover the modifications and variations of this invention provided they come within the scope of the appended claims and their equivalents.

### EXAMPLES

[0061] The following Examples should not be construed as limiting the scope of this disclosure.

### Materials and Methods

[0062] Throughout the Examples, the following materials and methods are used unless otherwise stated. In general, the practice of the techniques of the present disclosure employs conventional methods of drug administration, and, unless otherwise indicated, conventional techniques of chemistry, molecular biology, recombinant DNA technology, immunology (especially, e.g., antibody technology), pharmacology, pharmacy, and standard techniques in polypeptide preparation.

### Cell Lines

[0063] All the human cell lines for use in the experiments described below may be obtained, as indicated. With one exception these are from American Type Culture Collection (ATCC, Manassas, Va.) or the US National Cancer Institute (NCI) e.g., from the Division of Cancer Treatment and Diagnostics (DCTD).
[0064] A549-ATCC® cat. No. CCL-185™
[0065] ADRr-NCI (redesignated NCI/ADR-RES)
[0066] BT-474-ATCC® cat. No. HTB-20™
[0067] BxPC-3-ATCC® cat. No. CRL1687™
[0068] Caki-1-ATCC® cat. No. HTB-46™
[0069] DU145-ATCC® cat. No. HTB-81™
[0070] SK-ES-1-ATCC® cat. No. HTB-86™
[0071] MCF7-ATCC® cat. No. HTB-22™
[0072] KP4-RIKEN cat. No. RCB 1005
[0073] HepG2-ATCC® cat. No. HB8065™

### Xenograft Studies

[0074] For each of the xenograft studies below, cells are resuspended 1:1 with PBS:Growth factor-reduced Matrigel® and injected subcutaneously into Nu/Nu mice. Tumors are allowed to develop for 8 days. Antibodies are injected intraperitoneally every 3 days (q3d) at the indicated doses/mouse. Tumor lengths and widths are measured twice a week manually by caliper, and tumor volume calculated using the following formula: π/6(L×W²). Each arm of a study contains 10 animals. All studies are carried out using methods approved by an internal IACUC panel.

### Pharmacodynamic Profiling in Xenografts

[0075] BxPC-3 mouse xenograft models are established using 5×10⁶ BxPC-3 cells that are resuspended 1:1 with PBS:Growth factor-reduced Matrigel® and injected subcutaneously into Nu/Nu mice. Tumors are allowed to develop for 8 days. Antibodies are injected intraperitoneally every 3 days (q3d) for 2 rounds of dosing.

[0076] For the BxPC-3 PD study, 4 treatment groups are established, each containing 4 mice. These included control, P4-G1-M1.3 (q3d, 600 μg), gemcitabine (q3d, 150 mg/kg) and P4-G1-M1.3+gemcitabine (combined individual doses). Tumors are excised on either day 19 or day 28, resulting in a total of 8 groups.

### Preparation of Tumor Cell Lysates

[0077] Tumors are initially weighed and pulverized in a CryoPrep® tissue pulverizer (Covaris). Tissue Extraction Reagent 1 (TER1, Life Technologies™) containing protease and phosphatase inhibitors was added to the tumor at a ratio of 1 ml TER1 per 100 mg of tissue. Samples are incubated on ice for 30 minutes to solubilize tissue and put through a QIAshredder™ column (Qiagen) according to the manufacturer's protocol. A BCA assay (Pierce) is performed to determine protein concentration according to the manufacturer's protocol.

### Western Blotting

[0078] Buffer containing β-Mercaptoethanol (β-ME) is added and lysates are boiled for 5 minutes at 95° C. Approximately 40 μg of protein and two ladders (Invitrogen) are run on each well of an 18-well gel (BioRad). Gels are run at 150 volts constant for approximately 90 minutes and transferred to nitrocellulose membranes using the 8 minute transfer program of the iBlot® (Invitrogen) transfer system. Membranes are blocked in Odyssey® Blocking Buffer (Licor@ Biosciences) for 1 hour at room temperature, and then incubated with primary antibodies overnight at 4° C. in 5% BSA in TBS-T. All antibodies are purchased from Cell Signaling and used at the recommended dilution. The following day membranes are washed 3×5 minutes each with TBS-T and then incubated with anti-Rabbit IgG-DyLight® 800 (Cell Signaling) or anti-Rabbit IRDye® 800 (Licor@ Biosciences) at 1:10,000-15,000 in 5% milk in TBS-T for 1 hour at room temperature. Membranes were then washed 3×5 minutes each with TBS-T and scanned using the Licor® Odyssey® system (Licor@ Biosciences). Intensities are quantified using Image Studio 2.0 and normalized to β-Actin levels.

### Example 1

[0079] Patients with renal cell carcinoma are treated by administration of monotherapy with either an effective amount of mTOR inhibitor everolimus (Afinitor®) or an effective amount of P4-G1-M1.3, or with combination therapy comprising or consisting of administration of both the effective amount of everolimus and the effective amount of P4-G1-M1.3.

[0080] P4-G1-M1.3 is formulated in 20 mM histidine, 100 mM arginine-HCl, 3% sucrose, at pH 5.5 supplemented with 0.002-0.02% of Tween® 80 at concentration range 5-15 mg/mL. P4-G1-M1.3 is administered to patients at 6 mg/kg, 12 mg/kg, 20 mg/kg, 30 mg/kg, 40 mg/kg, 50 mg/kg or 60 mg/kg q7d, q14d, q21d, or q28d with a loading dose of 12 mg/kg, 20 mg/kg, 40 mg/kg, 40 mg/kg or 60 mg/kg Everolimus is administered to patients at 2.5 mg, 5 mg, or 10 mg orally once a day or once every other day.

[0081] The combination therapy will provide a combinatorially enhanced outcome.

### Example 2

[0082] The advantages of combination therapy per Example 1 are demonstrated in a preclinical model. 8×10⁶ Caki-1 human renal carcinoma cells were prepared and used essentially as described in the methods above and mice were treated with P4-G1-M1.3 at 500, 300, or 100 μg, or everolimus at 30 mpk or 3 mpk, or 3 mpk everolimus+500 μg P4-G1-M1.3. As shown in FIG. 1, P4-G1-M1.3 suppresses tumor growth of Caki-1 renal cell carcinoma cancer cells in vivo and potentiates responses to everolimus.

### Example 3

[0083] Patients with gastrointestinal neuroendocrine tumors are treated by administration of either monotherapy with an effective amount of everolimus or an effective amount of P4-G1-M1.3, or with combination therapy comprising or consisting of administration of both the effective amount of everolimus and the effective amount of P4-G1-M1.3. P4-G1-M1.3 and everolimus are prepared and dosed as described in Example 1. The combination therapy will provide a combinatorially enhanced outcome.

### Example 4

[0084] The advantages of combination therapy per Example 3 are demonstrated in a preclinical model carried out using the methods of Example 2 adapted for the substitution of human pancreatic adenocarcinoma BXPC-3 cells for the Caki-1 cells of Example 2. The results will demonstrate that P4-G1-M1.3 suppresses tumor growth of BXPC-3 cells in vivo and potentiates responses to everolimus.

### Example 5

[0085] Patients with non-small cell lung cancer (NSCLC) are treated by administration of either monotherapy with an effective amount of everolimus or an effective amount of P4-G1-M1.3, or with combination therapy comprising or consisting of administration of both the effective amount of everolimus and the effective amount of P4-G1-M1.3. P4-G1-M1.3 and everolimus are prepared and dosed as described in Example 1. The combination therapy will provide a combinatorially enhanced outcome.

### Example 6

[0086] The advantages of combination therapy per Example 5 are demonstrated in a preclinical model carried out using the methods of Example 2 adapted for the substitution of human NSCLC A549 cells for the Caki-1 cells of Example 2. The results will demonstrate that P4-G1-M1.3 suppresses tumor growth of A549 cells in vivo and potentiates responses to everolimus.

### Example 7

[0087] Patients with gastrointestinal neuroendocrine tumors are treated by administration of either monotherapy with an effective amount of mTOR inhibitor temsirolimus (Torisel®) or an effective amount of P4-G1-M1.3, or with combination therapy comprising or consisting of administration of both the effective amount of temsirolimus and the effective amount of P4-G1-M1.3. P4-G1-M1.3 is prepared and dosed as described in Example 1. Temsirolimus is dosed at 2.5 mg, 7.5 mg, 15 mg, or 25 mg (25 mg is the manufacturer's recommended dose) infused over a 30-60 minute period once a week. The combination therapy will provide a combinatorially enhanced outcome.

### Example 8

[0088] The advantages of combination therapy per Example 7 are demonstrated in a preclinical model carried out using the methods of Example 2 adapted for the substitution of human pancreatic adenocarcinoma BXPC-3 cells for the Caki-1 cells of Example 2. The results will show that P4-G1-M1.3 suppresses tumor growth of BXPC-3 cells in vivo and potentiates the response to everolimus.

### Example 9

[0089] The advantages of combination therapy per Example 1 are demonstrated in animal models where the tumor type Ewing's sarcoma family of tumors, or renal cell carcinoma (second line in patients refractory to sunitinib).

### Example 10

[0090] The advantages of combination therapy per Example 9 are demonstrated in a preclinical model carried out using the methods of Example 2 adapted for the substitution of SK-ES-1 human Ewing sarcoma cells for the Caki-1 cells of Example 2. The results will show that P4-G1-M1.3 suppresses tumor growth of SK-ES-1 cells in vivo and potentiates responses to everolimus.

### Example 11

[0091] Patients with gastrointestinal neuroendocrine tumors are treated by administration of either monotherapy with an effective amount of mTOR inhibitor sirolimus (Rapamune®) or an effective amount of P4-G1-M1.3, or with combination therapy comprising or consisting of administration of both the effective amount of sirolimus and the effective amount of P4-G1-M1.3. P4-G1-M1.3 is prepared and dosed as described in Example 1. Patients are dosed with sirolimus at 0.2 mg, 0.5 mg, 2 mg, 5 mg, 10 mg, 15 mg, or 20 mg orally once a day with a loading dose of 0.6 mg, 1.5 mg, 6 mg, 15 mg, or 30 mg (3× the maintenance dose. The combination therapy will provide a combinatorially enhanced outcome.

### Example 12

[0092] The advantages of combination therapy per Example 11 are demonstrated in a preclinical model carried out using the methods of Example 2. The results will show that P4-G1-M1.3 suppresses tumor growth of Caki-1 cells in vivo and potentiates responses to sirolimus.

### Example 13

[0093] Patients with estrogen receptor positive or progesterone receptor positive or triple negative breast cancers that are locally advanced or metastatic, or with any of the tumor types listed in Examples 5-10, are treated with a combination of an effective amount of i) any of the mTOR inhibitors of the preceding examples (at doses as described therein), or with a pan-mTOR inhibitor (INK128, CC223, OSI207, AZD8055, AZD2014, or Palomid529) and ii) an effective amount of P4-G1-M1.3. Patients are dosed with P4-G1-M1.3 as described in Example 1. The dose of pan-mTOR inhibitor is the dose used in phase I or, preferably phase II or III clinical trials. The combination therapy will provide a combinatorially enhanced outcome.

### Example 14

[0094] Postmenopausal women with estrogen receptor-positive locally advanced or metastatic breast cancer are treated with a combination of an effective amount of PI3K inhibitor (e.g., XL147 or BKM120) and an effective amount of P4-G1-M1.3. Patients are dosed with P4-G1-M1.3 as described in Example 1. XL147 is dosed at 25, 50, 100, or 200 mg orally once a day for 21 consecutive days. Alternately BKM120 is dosed at 12.5, 25, 50, 100, or 20 mg orally once a day for 28 consecutive days. The combination therapy will provide a combinatorially enhanced outcome.

### Example 15

[0095] The advantages of combination therapy per Examples 13 and 14 are demonstrated in preclinical models carried out using the methods of Example 2 adapted for the use of MCF7 or BT474-M3 human ER/PR positive breast cancer cells. The results will demonstrate that P4-G1-M1.3 suppresses tumor growth of MCF7 cells and BT474-M3 cells in vitro and in vivo and potentiates responses to the PI3K inhibitors and the mTOR inhibitors of the preceding Examples.

### Example 16

[0096] Women with estrogen or progesterone receptor positive locally advanced or metastatic breast cancer are treated with a combination therapy comprising or consisting of administration of an effective amount of an antihormonal therapy (such as tamoxifen, exemestane, letrozole or fulvestrant) and administration of an effective amount of P4-G1-M1.3. P4-G1-M1.3 is formulated and administered as described above. Antihormonal therapy is administered in accordance with manufacturer's directions. The combination therapy will provide a combinatorially enhanced outcome.

### Example 17

[0097] Women with estrogen or progesterone receptor positive locally advanced or metastatic breast cancer are treated with a combination of an effective amount of PI3K/mTOR dual inhibitor NVP-BEZ235 and an effective amount of P4-G1-M1.3. Patients are dosed with P4-G1-M1.3 as described in Example 1. NVP-BEZ235 is given orally twice daily at doses of 400 mg, 600 mg, or 800 mg. The combination therapy will provide a combinatorially enhanced outcome.

[0098] The preclinical models to demonstrate the working of this Example is adapted from Examples 2, 4, 6, 8, 10, 12, and 15 using the ZR-75-1 human breast cancer cells and Caki-1 cells.

### Example 18

[0099] The combination therapies of Examples 1, 11, 13, 14 and 17 are expanded to include patients in which the tumor type can be pancreatic cancer, Ewing's sarcoma family of tumors, NSCLC, renal cell carcinoma (second line in renal carcinoma patients refractory to sunitinib (Sutent®)), or estrogen or progesterone receptor positive locally advanced or metastatic breast cancer.

[0100] Preclinical models to demonstrate these combination effects are carried out using MCF7, BT474-M3, BxPC-3, SK-ES-1, A549, CAM-1, and ZR-75-1 cells in vitro and in vivo.

### Example 19

[0101] Patients with pancreatic carcinoma are treated with a combination of an effective amount of gemcitabine, cytarabine, capecitabine, or 5-fluorouracil (5-FU) and an effective amount of P4-G1-M1.3. Patients are dosed with P4-G1-M1.3 as described in Example 1. Patients are dosed with the manufacturer's recommended dose of gemcitabine, capecitabine or 5-FU. The combination therapy will provide a combinatorially enhanced outcome.

[0102] Preclinical xenograft data to support this Example were obtained using the pancreatic carcinoma cancer model BxPC-3. Using BxPC-3 xenografts, mice with control tumors were compared to those treated with monotherapy with P4-G1-M1.3, monotherapy with gemcitabine or combination therapy with P4-G1-M1.3 and gemcitabine. As shown in FIG. 2, P4-G1-M1.3 downregulates receptor complexes and inhibits PI3K/AKT/mTOR signaling in BxPC-3 PD study tumors. Results appear in the figures as follows: downregulation of IGF-1R and Insulin Receptor (FIG. 2A), EGFR and ErbB3 (FIG. 2B), ErbB2 (FIG. 2C), suppression of phosphoprotein in PI3K/AKT/mTOR signaling network such as phospho-AKT (FIG. 2D), phospho-FoxO and phospho-PDK1 (FIG. 2E), phospho-mTOR (FIG. 2F), phospho-S6(FIG. 2G), pRAS40 (FIG. 2I) and p4EB-PB1 (FIG. 2J). In addition P4-G1-M1.3 inhibits ERK phosphorylation and potentiates apoptosis-inducing activity of gemcitabine (FIG. 2H)

### Example 20

[0103] Other tumor types that can be beneficially treated with effective amounts of bispecific anti-IGF-1R and anti-ErbB3 antibodies disclosed herein in combinations administered in accordance with this disclosure include thyroid carcinoma, head and neck squamous cell carcinoma, breast carcinoma, lung cancer (e.g., small-cell lung carcinoma, non-small-cell lung carcinoma), gastric carcinoma, gastrointestinal stromal tumors, ovarian carcinoma, bile duct carcinoma, endometrial carcinoma, prostate carcinoma, renal cell carcinoma, anaplastic large-cell lymphoma, leukemia (e.g., acute myeloid leukemia, T-cell leukemia, chronic lymphocytic leukemia), multiple myeloma, malignant mesothelioma, malignant melanoma, colon cancer, sarcoma. Each combination therapy will provide a combinatorially enhanced outcome.

### Example 21

[0104] Patients with pancreatic cancer (KRAS wild-type and KRAS mutant) are treated with a combination of an effective amount of a MEK inhibitor (e.g., GSK1120212, BAY 86-9766 or AZD6244) and an effective amount of P4-G1-M1.3. Patients are dosed with P4-G1-M1.3 as described in Example 1. The clinical dose of MEK inhibitor is the dose used for that inhibitor in phase II or phase III clinical trials. The combination therapy will provide a combinatorially enhanced outcome.

[0105] As shown in FIG. 3, treatment of cancer cells in vitro with GSK1120212 and P4-G1-M1.3 results in inhibition of signaling in both a wild-type and KRAS mutant background. The preclinical models to support this example are performed using BxPC-3 (KRAS wild-type) and KP4 (KRAS mutant) cell lines.

### Example 22

[0106] Women with locally advanced or metastatic breast cancer are treated with a combination of an effective amount of docetaxel (Taxotere®) and an effective amount of P4-G1-M1.3. Patients are dosed with P4-G1-M1.3 as described in Example 1. Patients are dosed with docetaxel at 25, 50, 75 or 100 mg/m² i.v. once every 3 weeks or per standard clinical practice. The combination therapy will provide a combinatorially enhanced outcome.

### Example 23

[0107] The advantages of combination therapy per Example 22 are demonstrated in a preclinical model in which the tumor type is a squamous cell carcinoma of the lung, prostate cancer or ovarian cancer, are demonstrated using the cell line DU145. As shown in FIG. 4, the combination of docetaxel and P4-G1-M1.3 results in inhibition of growth of DU145 prostate cancer cells in vivo. FIGS. 6 and 7 demonstrate the in vivo effects of P4-G1-M1.3, Docetaxel, or the combination on total IGF-1R (FIG. 6) and total ErbB3 (FIG. 7) in DU145 xenografts. Statistical significance across groups was determined using the student's T-test (*,p<0.05 vs control.; #,p<0.05 vs docetaxel; a,p<0.05 vs P4-G1-M1.3).

### Example 24

[0108] Patients with metastatic breast cancer are treated with a combination of an effective amount of paclitaxel (Taxol®) or of eribulin and an effective amount of P4-G1-M1.3. Patients are dosed with P4-G1-M1 as described in Example 1. Patients are dosed per standard clinical practice for paclitaxel or eribulin. The combination therapy will provide a combinatorially enhanced outcome.

### Example 25

[0109] The treatments of Example 24 are repeated in patients where the tumor type is squamous cell carcinoma of the lung, prostate cancer or ovarian cancer. The results will be the same as obtained in Example 24.

### Example 26

[0110] Patients with hepatocellular carcinoma (HCC) are treated with P4-G1-M1.3 monotherapy. Patients are dosed with P4-G1-M1.3 as described in Example 1 (second line in patients refractory to sorafenib). Patients will obtain a statistically significant improvement in HCC symptoms (e.g., time to progression or progression-free survival at pre-defined intervals) compared to untreated historical controls or to best supportive care. Preclinical data to support this example may be obtained using HepG2 cells in vitro and in vivo.

### Example 27

[0111] Patients with hepatocellular carcinoma (HCC) are treated with a combination of an effective amount of sorafenib and an effective amount of P4-G1-M1.3. Patients are dosed with P4-G1-M1.3 as described in Example 1. Patients are dosed with sorafenib at 400 mg daily. The combination therapy will provide a combinatorially enhanced outcome. Preclinical data to support this example may be obtained using HepG2 cells in vitro and in vivo. As shown in FIG. 5, treatment of HepG2 hepatocellular carcinoma cells with the combination of sorafenib and P4-G1-M1.3 results in downregulation of ErbB3 and inhibits downstream signaling when compared to treatments with sorafenib alone or with P4-G1-M1.3 alone.

### Example 28

[0112] Patients with melanoma are treated by administration of either monotherapy with an effective amount of vemurafenib (Zelboraf®) or an effective amount of P4-G1-M1.3, or with combination therapy comprising or consisting of administration of both the effective amount of vemurafenib or dabrafenib and the effective amount of P4-G1-M1.3. P4-G1-M1.3 is formulated and administered as described above in Example 1. Vemurafenib is given orally at 960 mg 1-2 times daily. Dabrafenib is administered as administered in dabrafenib phase III clinical trials. The combination therapy will provide a combinatorially enhanced outcome.

### Example 29

[0113] Patients with Ewing's sarcoma or metastatic pancreatic cancer are treated with a combination of an effective amount of irinotecan (Camptosar®) or nanoliposomal irinotecan and an effective amount of P4-G1-M1.3. P4-G1-M1.3 is formulated and administered as described above (e.g., Example 1). Nanoliposomal irinotecan is given i.v. at 80 mg/m² or 120 mg/m² q3w. Camptosar® is administered per manufacturer's directions. The combination therapy will provide a combinatorially enhanced outcome.

### EQUIVALENTS

[0114] Those skilled in the art will recognize, or be able to ascertain and implement using no more than routine experimentation, many equivalents of the specific embodiments described herein. Such equivalents are intended to be encompassed by the following claims. Any combinations of the embodiments disclosed in the dependent claims are contemplated to be within the scope of the disclosure.

### INCORPORATION BY REFERENCE

[0115] The disclosure of each and every U.S. and foreign patent and pending patent application and publication referred to herein is specifically incorporated by reference herein in its entirety.

The application's sequence listing, which the Patent Office published only in electronic form, follows.

SEQUENCE LISTING (417 sequences)

SEQ ID NO: 1 - protein, 214 aa, Artificial Sequence
  Description of Artificial Sequence: Synthetic polypeptide
  SF KAPPA LIGHT CHAIN
DIQMTQSPSSLSASTGDRVTITCRASQGISSYLAWYQQKPGKAPKLLIYAASTLQSGVPSRFSGSGSGTDFTLTISSLQPEDFATYYCQQYFTFPLTFGGGTKVEIKRTVAAPSVFIFPPSDEQLKSGTASVVCLLNNFYPREAKVQWKVDNALQSGNSQESVTEQDSKDSTYSLSSTLTLSKADYEKHKVYACEVTHQGLSSPVTKSFNRGEC

SEQ ID NO: 2 - DNA, 648 bp, Artificial Sequence
  Description of Artificial Sequence: Synthetic polynucleotide
  SF KAPPA LIGHT CHAIN
gacattcagatgacccagagcccctcatcactgtccgcgtcaacgggggatagggtcactatcacttgcagagcatcgcaggggatcagctcctatctcgcgtggtatcagcagaagccaggaaaggcaccgaagctgcttatctacgccgcctcgacattgcagtcgggcgtacctagccgcttctcgggatcaggatcgggtacggactttactttgacaattagcagcctccaacccgaggatttcgctacgtactattgccagcagtacttcacatttccgttgaccttcggtggagggactaaggtggagatcaagcgtacggtcgcagctccttcggtattcatctttccgccctccgatgagcagctcaaatccggtacagcctcggtggtgtgcctgctgaataacttctatccccgggaggcgaaagtgcagtggaaagtggacaacgcgctccaatcaggaaattcccaagaatcagtcacagaacaggattcgaaagactcgacctactcactttcgtcgaccttgacgctctccaaggccgactacgagaaacacaaggtgtatgcgtgtgaagtcacacatcaagggctttcatccccagtcacgaagtcattcaaccgcggtgaatgttgataa

SEQ ID NO: 3 - protein, 214 aa, Artificial Sequence
  Description of Artificial Sequence: Synthetic polypeptide
  P4 KAPPA LIGHT CHAIN
DIQMTQSPSSLSASLGDRVTITCRASQGISSYLAWYQQKPGKAPKLLIYAKSTLQSGVPSRFSGSGSGTDFTLTISSLQPEDSATYYCQQYWTFPLTFGGGTKVEIKRTVAAPSVFIFPPSDEQLKSGTASVVCLLNNFYPREAKVQWKVDNALQSGNSQESVTEQDSKDSTYSLSSTLTLSKADYEKHKVYACEVTHQGLSSPVTKSFNRGEC

SEQ ID NO: 4 - DNA, 648 bp, Artificial Sequence
  Description of Artificial Sequence: Synthetic polynucleotide
  P4 KAPPA LIGHT CHAIN
gatattcaaatgacacagtcaccctcgtcactcagcgccagccttggggaccgcgtaacgatcacgtgtagagcgtcgcaggggatttcctcgtatctggcgtggtatcagcaaaagcctggtaaagctccgaaactcctgatctacgccaagtcgaccttgcagtccggagtcccctcaaggttcagcgggtcgggatccggtacagatttcaccctgaccatctcaagcctccagccagaggactccgcaacgtactattgccagcagtactggacgtttcctttgacttttggaggcggaacaaaggtggaaatcaaacgtacggtcgcagctccttcggtattcatctttccgccctccgatgagcagctcaaatccggtacagcctcggtggtgtgcctgctgaataacttctatccccgggaggcgaaagtgcagtggaaagtggacaacgcgctccaatcaggaaattcccaagaatcagtcacagaacaggattcgaaagactcgacctactcactttcgtcgaccttgacgctctccaaggccgactacgagaaacacaaggtgtatgcgtgtgaagtcacacatcaagggctttcatccccagtcacgaagtcattcaaccgcggtgaatgttgataa

SEQ ID NO: 5 - protein, 214 aa, Artificial Sequence
  Description of Artificial Sequence: Synthetic polypeptide
  M78 KAPPA LIGHT CHAIN
DIQMTQSPSSLSASLGDRVTITCRASQGISSYLAWYQQKPGKAPKLLIYASSTRQSGVPSRFSGSGSGTDFTLTISSLQPEDSGTYYCQQYWAFPLTFGGGTKVEIKRTVAAPSVFIFPPSDEQLKSGTASVVCLLNNFYPREAKVQWKVDNALQSGNSQESVTEQDSKDSTYSLSSTLTLSKADYEKHKVYACEVTHQGLSSPVTKSFNRGEC

SEQ ID NO: 6 - DNA, 648 bp, Artificial Sequence
  Description of Artificial Sequence: Synthetic polynucleotide
  M78 KAPPA LIGHT CHAIN
gatatccagatgacacagtcaccgtcctcattgtcagcgtcgctgggggaccgagtgacgattacgtgtcgcgcgtcacaggggatctccagctatctcgcgtggtatcaacagaagccgggcaaagcccccaagctccttatctacgcctccagcacaagacaaagcggagtaccaagccggttctcggggtcgggatcgggaacagactttacacttactatttcgtcgctgcagcccgaagattcgggaacctactattgccagcagtactgggcattccccctgacgttcggcggtggtactaaagtcgagatcaagcgtacggtcgcagctccttcggtattcatctttccgccctccgatgagcagctcaaatccggtacagcctcggtggtgtgcctgctgaataacttctatccccgggaggcgaaagtgcagtggaaagtggacaacgcgctccaatcaggaaattcccaagaatcagtcacagaacaggattcgaaagactcgacctactcactttcgtcgaccttgacgctctccaaggccgactacgagaaacacaaggtgtatgcgtgtgaagtcacacatcaagggctttcatccccagtcacgaagtcattcaaccgcggtgaatgttgataa

SEQ ID NO: 7 - protein, 214 aa, Artificial Sequence
  Description of Artificial Sequence: Synthetic polypeptide
  M57 KAPPA LIGHT CHAIN
DIQLTQSPSSLSASLGDRVTITCRASQGISSYLAWYQQKPGKAPKLLIYARSTRQSGVPSRFSGSGSGTEFTLTISSLQPEDSATYYCQQYWTWPLTFGGGTKVEIKRTVAAPSVFIFPPSDEQLKSGTASVVCLLNNFYPREAKVQWKVDNALQSGNSQESVTEQDSKDSTYSLSSTLTLSKADYEKHKVYACEVTHQGLSSPVTKSFNRGEC

SEQ ID NO: 8 - DNA, 648 bp, Artificial Sequence
  Description of Artificial Sequence: Synthetic polynucleotide
  M57 KAPPA LIGHT CHAIN
gatatccagttgacccagtcgccctcgtccctctcggcatcactgggtgaccgggtgactattacgtgtagagcgtcacagggaatctcaagctatttggcctggtatcagcaaaagccggggaaagcccctaagctcctgatctacgcgcgctcgacgcgacagagcggagtacccagcaggttttccggatcggggtcaggtacagaattcacccttacgatttcgtcgctccaacccgaggactccgcgacgtactactgccagcaatactggacttggccgctcacgtttgggggaggcacgaaggtcgagatcaaacgtacggtcgcagctccttcggtattcatctttccgccctccgatgagcagctcaaatccggtacagcctcggtggtgtgcctgctgaataacttctatccccgggaggcgaaagtgcagtggaaagtggacaacgcgctccaatcaggaaattcccaagaatcagtcacagaacaggattcgaaagactcgacctactcactttcgtcgaccttgacgctctccaaggccgactacgagaaacacaaggtgtatgcgtgtgaagtcacacatcaagggctttcatccccagtcacgaagtcattcaaccgcggtgaatgttgataa

SEQ ID NO: 9 - protein, 720 aa, Artificial Sequence
  Description of Artificial Sequence: Synthetic polypeptide
  SF-G1-C8 (16F)
EVQLLQSGGGLVQPGGSLRLSCAASGFTFSVYPMHWVRQAPGKGLEWVSSISSSGGATRYADSVKGRFTISRDNSKNTLYLQMNSLRAEDTAVYYCAKDFYDILTGNAFDIWGQGTTVTVSSASTKGPSVFPLAPSSKSTSGGTAALGCLVKDYFPEPVTVSWNSGALTSGVHTFPAVLQSSGLYSLSSVVTVPSSSLGTQTYICNVNHKPSNTKVDKKVEPKSCDKTHTCPPCPAPELLGGPSVFLFPPKPKDTLMISRTPEVTCVVVDVSHEDPEVKFNWYVDGVEVHNAKTKPREEQYNSTYRVVSVLTVLHQDWLNGKEYKCKVSNKALPAPIEKTISKAKGQPREPQVYTLPPSREEMTKNQVSLTCLVKGFYPSDIAVEWESNGQPENNYKTTPPVLDSDGSFFLYSKLTVDKSRWQQGNVFSCSVMHEALHNHYTQKSLSLSPGGGGGSGGGGSGGGGSQVQLVQSGGGLVQPGGSLRLSCAASGFTFDDYAMHWVRQAPGKGLEWVAGISWNSGSIGYADSVKGRFTISRDNAKNSLYLQMNSLRPEDTAVYYCARDLGYNQWVEGFDYWGQGTLVTVSSASTGGGGSGGGGSGGGGSGGGGSSYELTQDPAVSVALGQTVRITCQGDSLRSYYASWYQQKPGQAPVLVIYGKNNRPSGIPDRFSGSTSGNSASLTITGAQAEDEADYYCNSRDSSGNHWVFGGGTKVTVLG

SEQ ID NO: 10 - DNA, 2166 bp, Artificial Sequence
  Description of Artificial Sequence: Synthetic polynucleotide
  SF-G1-C8 (16F)
gaggtgcagctcctccaaagcggagggggtttggtccagcccggtggctcgttgcgcctctcatgtgccgcgtcggggtttacattcagcgtctatccgatgcactgggtacgacaggcgccagggaaaggactggagtgggtgtcatcgatcagcagctccggaggtgctacaagatatgccgactcggtgaaaggccgctttacgatcagccgcgataacagcaagaatacgttgtacctccaaatgaactcgctgcgagccgaggacactgcggtgtactattgcgcgaaggatttctatgacatccttactggtaatgcgtttgatatctggggccaggggacaacggtcaccgtgagctcggccagcacgaaggggcctagcgtctttccgctcgccccctcgtcaaaatcaacgtcgggtggaacggccgcattgggttgtctcgtaaaggactactttccggaacccgtcaccgtatcgtggaattcaggcgccctgacttccggggtccacacctttcccgctgtcttgcagtcctcgggtttgtattcactgtcgtcagtggtgacagtaccatcatcctcactgggaactcaaacgtacatctgcaacgtgaaccacaagccgagcaacactaaggtggataagaaggtagagcccaagtcatgcgacaaaacgcatacatgcccgccatgccccgcaccagaacttttgggaggtccgtcagtgtttctctttccgcctaagcccaaagacacactgatgatttcccggacgcccgaagtcacttgtgtggtcgtcgacgtgtcccatgaagatcccgaagtaaagttcaactggtatgtcgacggtgtggaagtccacaatgcaaaaaccaagcccagggaagaacagtacaacagcacatatcgagtggtgagcgtgttgaccgtgctgcaccaagactggctcaatggaaaggagtacaaatgcaaagtgtccaacaaggcactgcctgcgcccattgagaaaacgatttcgaaagcaaagggacagccaagagaaccccaagtgtatacccttcccccgtcgcgcgaggaaatgacgaagaaccaggtatcgttgacgtgtcttgtaaagggattctatccctcggacatcgcggtcgagtgggagtccaacggacagccagagaataactacaaaaccacaccgcctgtgctggattccgacgggtcgtttttcttgtattcgaagcttacggtagacaaaagccggtggcagcagggtaatgtgttcagctgctcagtaatgcacgaggctctccataatcattacactcagaagtccctttccctttcgccgggagggggtgggggatccggcggaggtgggtcgggaggtggaggatcacaagtgcaattggtacagtcgggaggcgggcttgtgcaacccggagggtcactgcgcctttcatgtgcggcgagcggtttcacgttcgatgattatgcgatgcattgggtacggcaggcacctggcaaagggttggagtgggtagccggaatctcgtggaatagcgggagcatcggttatgcggattccgtcaaagggaggtttacaatttcgagggacaatgcgaagaacagcctgtatctccaaatgaattcgctcaggcccgaagataccgccgtctactactgcgcgagggacttgggatacaaccagtgggtggaagggtttgattactgggggcaggggactctggtaactgtctcatcggcatcgactggtggtggcgggtccggagggggaggaagcggaggaggcgggagcggaggcggtgggtccagctacgaactgactcaagatccggccgtatcggtggccctcggacaaacagtgcgaatcacctgtcagggggatagccttagatcgtactacgcttcgtggtatcagcaaaagcccggacaggcaccagtgcttgtgatctacggaaagaacaatagaccgagcggaattccggatcggttttcgggttcgacttccggaaattcggcgtcgctcacgatcaccggagctcaggcagaggatgaagcggattactattgtaattcccgcgattcgtcggggaatcattgggtgttcggtgggggtacaaaggtaactgtactcggctgataa

SEQ ID NO: 11 - protein, 715 aa, Artificial Sequence
  Description of Artificial Sequence: Synthetic polypeptide
  SF-G1-P1
EVQLLQSGGGLVQPGGSLRLSCAASGFTFSVYPMHWVRQAPGKGLEWVSSISSSGGATRYADSVKGRFTISRDNSKNTLYLQMNSLRAEDTAVYYCAKDFYDILTGNAFDIWGQGTTVTVSSASTKGPSVFPLAPSSKSTSGGTAALGCLVKDYFPEPVTVSWNSGALTSGVHTFPAVLQSSGLYSLSSVVTVPSSSLGTQTYICNVNHKPSNTKVDKKVEPKSCDKTHTCPPCPAPELLGGPSVFLFPPKPKDTLMISRTPEVTCVVVDVSHEDPEVKFNWYVDGVEVHNAKTKPREEQYNSTYRVVSVLTVLHQDWLNGKEYKCKVSNKALPAPIEKTISKAKGQPREPQVYTLPPSREEMTKNQVSLTCLVKGFYPSDIAVEWESNGQPENNYKTTPPVLDSDGSFFLYSKLTVDKSRWQQGNVFSCSVMHEALHNHYTQKSLSLSPGGGGGSGGGGSGGGGSEVQLVESGGGLVQPGRSLRLSCAASGFTFDDYAMHWVRQAPGKGLEWVSGISWDSGSTGYADSVKGRFTISRDNAKNSLYLQMNSLRAEDTALYYCARDLGAYQWVEGFDYWGQGTLVTVSSASTGGGGSGGGGSGGGGSSSELTQDPAVSVALGQTVRITCQGDSLRSYYASWYQQKPGQAPVLVIYGKNNRPSGIPDRFSGSSSGNTASLTITGAQAEDEADYYCESRDSPGNQWVFGGGTKVTVLG

SEQ ID NO: 12 - DNA, 2154 bp, Artificial Sequence
  Description of Artificial Sequence: Synthetic polynucleotide
  SF-G1-P1
gaggtccagctcctccagtcaggtggaggactggtgcaacccggaggttcacttcggctgtcgtgtgcggcatcgggattcacgttttcggtgtatccgatgcattgggtgcgacaagctccgggcaaagggcttgaatgggtgtcgtccatctcgtcgtcgggaggagcaacgaggtatgccgattccgtaaagggtaggttcaccatctcacgcgacaattccaagaatacgttgtacctgcagatgaattcgcttagggcagaagatacggccgtgtactattgcgcaaaagatttctatgacattcttactggtaatgcgttcgatatctggggtcagggaactaccgtaacggtgtcgagcgctagcactaagggaccgtccgtgtttcccctcgcgcctagctcgaagagcacatcgggaggaacagcggcgctcggctgtctcgtcaaagactacttccccgagccggtgaccgtgagctggaattccggagcgttgacctcaggggtgcatacattccctgccgtactgcaatcatcagggctctactcattgtcgagcgtagtgactgtaccgtcgtcatcgctcggaacgcagacgtacatctgcaatgtcaatcacaagccctccaatactaaggtagataagaaagtagaaccgaagtcgtgtgataagacccatacatgccctccgtgccccgcaccggaactcttgggtggcccatcagtctttctgttcccgccaaagcccaaagacacactgatgatttcgcgcacgcccgaagtcacttgcgtcgtggtggatgtgtcgcatgaggacccggaggtcaagttcaactggtacgtcgatggtgtagaagtccacaacgccaagaccaagcctcgggaggagcagtataactccacctaccgggtagtgagcgtgcttacagtgctccatcaggactggctgaacggcaaagaatacaaatgcaaagtcagcaacaaagcgctgccagcgcccatcgagaaaacaattagcaaagcgaaagggcagcccagagaacctcaagtgtatacattgccgccgtcgcgggaggaaatgacaaagaatcaggtatccctgacgtgtcttgtgaaaggcttttacccatccgacattgcggtagagtgggagtcgaatgggcaacccgagaacaactataagacgactcccccagtcttggattcagacggatcctttttcttgtactcgaaactcacagtcgacaagtccagatggcagcaggggaacgtgttcagctgcagcgtgatgcacgaggcccttcacaaccactatacgcagaaatcattaagcttatcgccaggtaaaggaggtggcgggagcgggggagggggatccggtggcggagggtcggaagtgcagctggtggagagcggaggtgggcttgtccaaccgggcaggtcacttagattgtcatgtgcggcgagcggttttacctttgacgattatgcgatgcactgggtccgccaggcaccggggaaggggctcgaatgggtatcaggaatctcgtgggactcggggtccacgggctatgcggactcggtcaaggggcgcttcacaatctcaagggacaatgccaaaaactcgctctatcttcagatgaactcattgcgagctgaggacacggcgctttactactgtgcgcgggatttgggtgcctatcaatgggtagaagggtttgattactgggggcagggaactctcgtgaccgtgtccagcgcatcgacgggaggaggaggttccgggggtgggggaagcgggggtggagggtcatcgtcagagctgacgcaagatcccgcggtatccgtcgcccttgggcagaccgtcaggattacgtgccagggagactcacttagaagctactacgcttcctggtatcagcaaaagccgggacaggcacccgtgttggtgatctacgggaagaataaccggcccagcgggattcctgaccgcttttcgggctcctcatcggggaacacagcctcgttgactatcacgggtgcgcaagccgaggacgaggcagactattactgtgaatcgcgagattcccctggtaatcagtgggtctttgggggaggaactaaggtaacggtattggggtgataa

SEQ ID NO: 13 - protein, 720 aa, Artificial Sequence
  Description of Artificial Sequence: Synthetic polypeptide
  SF-G1-M1.3
EVQLLQSGGGLVQPGGSLRLSCAASGFTFSVYPMHWVRQAPGKGLEWVSSISSSGGATRYADSVKGRFTISRDNSKNTLYLQMNSLRAEDTAVYYCAKDFYDILTGNAFDIWGQGTTVTVSSASTKGPSVFPLAPSSKSTSGGTAALGCLVKDYFPEPVTVSWNSGALTSGVHTFPAVLQSSGLYSLSSVVTVPSSSLGTQTYICNVNHKPSNTKVDKKVEPKSCDKTHTCPPCPAPELLGGPSVFLFPPKPKDTLMISRTPEVTCVVVDVSHEDPEVKFNWYVDGVEVHNAKTKPREEQYNSTYRVVSVLTVLHQDWLNGKEYKCKVSNKALPAPIEKTISKAKGQPREPQVYTLPPSREEMTKNQVSLTCLVKGFYPSDIAVEWESNGQPENNYKTTPPVLDSDGSFFLYSKLTVDKSRWQQGNVFSCSVMHEALHNHYTQKSLSLSPGGGGGSGGGGSGGGGSQVQLVQSGGGLVQPGGSLRLSCAASGFTFDDYAMHWVRQAPGKGLEWVAGISWDSGSTGYADSVKGRFTISRDNAKNSLYLQMNSLRAEDTALYYCARDLGAYQWVEGFDYWGQGTLVTVSSASTGGGGSGGGGSGGGGSGGGGSSYELTQDPAVSVALGQTVRITCQGDSLRSYYASWYQQKPGQAPVLVIYGKNNRPSGIPDRFSGSTSGNSASLTITGAQAEDEADYYCNSRDSPGNQWVFGGGTKVTVLG

SEQ ID NO: 14 - DNA, 2169 bp, Artificial Sequence
  Description of Artificial Sequence: Synthetic polynucleotide
  SF-G1-M1.3
gaggtccagctcctccagtcaggtggaggactggtgcaacccggaggttcacttcggctgtcgtgtgcggcatcgggattcacgttttcggtgtatccgatgcattgggtgcgacaagctccgggcaaagggcttgaatgggtgtcgtccatctcgtcgtcgggaggagcaacgaggtatgccgattccgtaaagggtaggttcaccatctcacgcgacaattccaagaatacgttgtacctgcagatgaattcgcttagggcagaagatacggccgtgtactattgcgcaaaagatttctatgacattcttactggtaatgcgttcgatatctggggtcagggaactaccgtaacggtgtcgagcgctagcactaagggaccgtccgtgtttcccctcgcgcctagctcgaagagcacatcgggaggaacagcggcgctcggctgtctcgtcaaagactacttccccgagccggtgaccgtgagctggaattccggagcgttgacctcaggggtgcatacattccctgccgtactgcaatcatcagggctctactcattgtcgagcgtagtgactgtaccgtcgtcatcgctcggaacgcagacgtacatctgcaatgtcaatcacaagccctccaatactaaggtagataagaaagtagaaccgaagtcgtgtgataagacccatacatgccctccgtgccccgcaccggaactcttgggtggcccatcagtctttctgttcccgccaaagcccaaagacacactgatgatttcgcgcacgcccgaagtcacttgcgtcgtggtggatgtgtcgcatgaggacccggaggtcaagttcaactggtacgtcgatggtgtagaagtccacaacgccaagaccaagcctcgggaggagcagtataactccacctaccgggtagtgagcgtgcttacagtgctccatcaggactggctgaacggcaaagaatacaaatgcaaagtcagcaacaaagcgctgccagcgcccatcgagaaaacaattagcaaagcgaaagggcagcccagagaacctcaagtgtatacattgccgccgtcgcgggaggaaatgacaaagaatcaggtatccctgacgtgtcttgtgaaaggcttttacccatccgacattgcggtagagtgggagtcgaatgggcaacccgagaacaactataagacgactcccccagtcttggattcagacggatcctttttcttgtactcgaaactcacagtcgacaagtccagatggcagcaggggaacgtgttcagctgcagcgtgatgcacgaggcccttcacaaccactatacgcagaaatcattaagcttatcgccaggtaaaggaggtggcgggagcgggggagggggatccggtggcggagggtcgcaagtgcagctggtgcaaagcggaggtgggcttgtccaacccggaggctcacttagattgtcatgtgcggcgagcggttttacctttgacgattatgcgatgcactgggtccgccaggcaccggggaaggggctcgaatgggtagccggaatctcgtgggactcggggtccacgggctatgcggactcggtcaaggggcgcttcacaatctcaagggacaatgccaaaaactcgctctatctgcagatgaactcattgcgagctgaggacacggcgctttactactgtgcgcgggatttgggtgcctatcaatgggtagaagggtttgattactgggggcagggaactctcgtgaccgtgtccagcgcatcgacgggaggaggaggttccgggggtgggggaagcgggggtggagggtcaggaggtgggggatcgtcatacgagctgacgcaagatcccgcggtatccgtcgcccttgggcagaccgtcaggattacgtgccagggagactcacttagaagctactacgcttcctggtatcagcaaaagccgggacaggcacccgtgttggtgatctacgggaagaataaccggcccagcgggattcctgaccgcttttcgggctccacctcagggaactcggcctcgttgactatcacgggtgcgcaagccgaggacgaggcagactattactgtaactcgcgagattcccctggtaatcagtgggtctttgggggaggaactaaggtaacggtattggggtgataa

SEQ ID NO: 15 - protein, 715 aa, Artificial Sequence
  Description of Artificial Sequence: Synthetic polypeptide
  SF-G1-M27
EVQLLQSGGGLVQPGGSLRLSCAASGFTFSVYPMHWVRQAPGKGLEWVSSISSSGGATRYADSVKGRFTISRDNSKNTLYLQMNSLRAEDTAVYYCAKDFYDILTGNAFDIWGQGTTVTVSSASTKGPSVFPLAPSSKSTSGGTAALGCLVKDYFPEPVTVSWNSGALTSGVHTFPAVLQSSGLYSLSSVVTVPSSSLGTQTYICNVNHKPSNTKVDKKVEPKSCDKTHTCPPCPAPELLGGPSVFLFPPKPKDTLMISRTPEVTCVVVDVSHEDPEVKFNWYVDGVEVHNAKTKPREEQYNSTYRVVSVLTVLHQDWLNGKEYKCKVSNKALPAPIEKTISKAKGQPREPQVYTLPPSREEMTKNQVSLTCLVKGFYPSDIAVEWESNGQPENNYKTTPPVLDSDGSFFLYSKLTVDKSRWQQGNVFSCSVMHEALHNHYTQKSLSLSPGGGGGSGGGGSGGGGSEVQLVESGGGLVQPGRSLRLSCAASGFTFDDYAMHWVRQAPGKGLEWVSGISWNSGSTGYADSVKGRFTISRDNAKNSLYLQMNSLRAEDTALYYCARDLGFNQWVDGFDYWGQGTLVTVSSASTGGGGSGGGGSGGGGSSSELTQDPAVSVALGQTVRITCQGDSLRSYYASWYQQKPGQAPVLVIYGKNNRPSGIPDRFSGSSSGNTASLTITGAQAEDEADYYCNSRDTPGDQWVFGGGTKVTVLG

SEQ ID NO: 16 - DNA, 2154 bp, Artificial Sequence
  Description of Artificial Sequence: Synthetic polynucleotide
  SF-G1-M27
gaggtccagctcctccagtcaggtggaggactggtgcaacccggaggttcacttcggctgtcgtgtgcggcatcgggattcacgttttcggtgtatccgatgcattgggtgcgacaagctccgggcaaagggcttgaatgggtgtcgtccatctcgtcgtcgggaggagcaacgaggtatgccgattccgtaaagggtaggttcaccatctcacgcgacaattccaagaatacgttgtacctgcagatgaattcgcttagggcagaagatacggccgtgtactattgcgcaaaagatttctatgacattcttactggtaatgcgttcgatatctggggtcagggaactaccgtaacggtgtcgagcgctagcactaagggaccgtccgtgtttcccctcgcgcctagctcgaagagcacatcgggaggaacagcggcgctcggctgtctcgtcaaagactacttccccgagccggtgaccgtgagctggaattccggagcgttgacctcaggggtgcatacattccctgccgtactgcaatcatcagggctctactcattgtcgagcgtagtgactgtaccgtcgtcatcgctcggaacgcagacgtacatctgcaatgtcaatcacaagccctccaatactaaggtagataagaaagtagaaccgaagtcgtgtgataagacccatacatgccctccgtgccccgcaccggaactcttgggtggcccatcagtctttctgttcccgccaaagcccaaagacacactgatgatttcgcgcacgcccgaagtcacttgcgtcgtggtggatgtgtcgcatgaggacccggaggtcaagttcaactggtacgtcgatggtgtagaagtccacaacgccaagaccaagcctcgggaggagcagtataactccacctaccgggtagtgagcgtgcttacagtgctccatcaggactggctgaacggcaaagaatacaaatgcaaagtcagcaacaaagcgctgccagcgcccatcgagaaaacaattagcaaagcgaaagggcagcccagagaacctcaagtgtatacattgccgccgtcgcgggaggaaatgacaaagaatcaggtatccctgacgtgtcttgtgaaaggcttttacccatccgacattgcggtagagtgggagtcgaatgggcaacccgagaacaactataagacgactcccccagtcttggattcagacggatcctttttcttgtactcgaaactcacagtcgacaagtccagatggcagcaggggaacgtgttcagctgcagcgtgatgcacgaggcccttcacaaccactatacgcagaaatcattaagcttatcgccaggtaaaggaggtggcgggagcgggggagggggatccggtggcggagggtcggaagtgcagctggtggagagcggaggtgggcttgtccaaccgggcaggtcacttagattgtcatgtgcggcgagcggttttacctttgacgattatgcgatgcactgggtccgccaggcaccggggaaggggctcgaatgggtatcaggaatctcgtggaattcggggtccacgggctatgcggactcggtcaaggggcgcttcacaatctcaagggacaatgccaaaaactcgctctatttgcaaatgaactcattgcgagctgaggacacggcgctttactactgtgcgcgggatttgggctttaaccaatgggtagacgggtttgattactgggggcagggaactctcgtgaccgtgtccagcgcatcgacgggaggaggaggttccgggggtgggggaagcgggggtggagggtcatcgtcagagctgacgcaagatcccgcggtatccgtcgcccttgggcagaccgtcaggattacgtgccagggagactcacttagaagctactacgcttcctggtatcagcaaaagccgggacaggcacccgtgttggtgatctacgggaagaataaccggcccagcgggattcctgaccgcttttcgggctcctcatcggggaacacagcctcgttgactatcacgggtgcgcaagccgaggacgaggcagactattactgtaactcgcgagatacgcctggtgaccagtgggtctttgggggaggaactaaggtaacggtattggggtgataa

SEQ ID NO: 17 - protein, 715 aa, Artificial Sequence
  Description of Artificial Sequence: Synthetic polypeptide
  SF-G1-P6
EVQLLQSGGGLVQPGGSLRLSCAASGFTFSVYPMHWVRQAPGKGLEWVSSISSSGGATRYADSVKGRFTISRDNSKNTLYLQMNSLRAEDTAVYYCAKDFYDILTGNAFDIWGQGTTVTVSSASTKGPSVFPLAPSSKSTSGGTAALGCLVKDYFPEPVTVSWNSGALTSGVHTFPAVLQSSGLYSLSSVVTVPSSSLGTQTYICNVNHKPSNTKVDKKVEPKSCDKTHTCPPCPAPELLGGPSVFLFPPKPKDTLMISRTPEVTCVVVDVSHEDPEVKFNWYVDGVEVHNAKTKPREEQYNSTYRVVSVLTVLHQDWLNGKEYKCKVSNKALPAPIEKTISKAKGQPREPQVYTLPPSREEMTKNQVSLTCLVKGFYPSDIAVEWESNGQPENNYKTTPPVLDSDGSFFLYSKLTVDKSRWQQGNVFSCSVMHEALHNHYTQKSLSLSPGGGGGSGGGGSGGGGSEVQLVESGGGLVQPGRSLRLSCAASGFTFDDYAMHWVRQAPGKGLEWVSGISWNSGSTGYADSVKGRFTISRDNAKNSLYLQMNSLRAEDTALYYCARDLGYNQWLEGFDYWGQGTLVTVSSASTGGGGSGGGGSGGGGSSSELTQDPAVSVALGQTVRITCQGDSLRSYYASWYQQKPGQAPVLVIYGKNNRPSGIPDRFSGSSSGNTASLTITGAQAEDEADYYCMSRDHPGNQWVFGGGTKVTVLG

SEQ ID NO: 18 - DNA, 2154 bp, Artificial Sequence
  Description of Artificial Sequence: Synthetic polynucleotide
  SF-G1-P6
gaggtccagctcctccagtcaggtggaggactggtgcaacccggaggttcacttcggctgtcgtgtgcggcatcgggattcacgttttcggtgtatccgatgcattgggtgcgacaagctccgggcaaagggcttgaatgggtgtcgtccatctcgtcgtcgggaggagcaacgaggtatgccgattccgtaaagggtaggttcaccatctcacgcgacaattccaagaatacgttgtacctgcagatgaattcgcttagggcagaagatacggccgtgtactattgcgcaaaagatttctatgacattcttactggtaatgcgttcgatatctggggtcagggaactaccgtaacggtgtcgagcgctagcactaagggaccgtccgtgtttcccctcgcgcctagctcgaagagcacatcgggaggaacagcggcgctcggctgtctcgtcaaagactacttccccgagccggtgaccgtgagctggaattccggagcgttgacctcaggggtgcatacattccctgccgtactgcaatcatcagggctctactcattgtcgagcgtagtgactgtaccgtcgtcatcgctcggaacgcagacgtacatctgcaatgtcaatcacaagccctccaatactaaggtagataagaaagtagaaccgaagtcgtgtgataagacccatacatgccctccgtgccccgcaccggaactcttgggtggcccatcagtctttctgttcccgccaaagcccaaagacacactgatgatttcgcgcacgcccgaagtcacttgcgtcgtggtggatgtgtcgcatgaggacccggaggtcaagttcaactggtacgtcgatggtgtagaagtccacaacgccaagaccaagcctcgggaggagcagtataactccacctaccgggtagtgagcgtgcttacagtgctccatcaggactggctgaacggcaaagaatacaaatgcaaagtcagcaacaaagcgctgccagcgcccatcgagaaaacaattagcaaagcgaaagggcagcccagagaacctcaagtgtatacattgccgccgtcgcgggaggaaatgacaaagaatcaggtatccctgacgtgtcttgtgaaaggcttttacccatccgacattgcggtagagtgggagtcgaatgggcaacccgagaacaactataagacgactcccccagtcttggattcagacggatcctttttcttgtactcgaaactcacagtcgacaagtccagatggcagcaggggaacgtgttcagctgcagcgtgatgcacgaggcccttcacaaccactatacgcagaaatcattaagcttatcgccaggtaaaggaggtggcgggagcgggggagggggatccggtggcggagggtcggaagtgcagctggtggagagcggaggtgggcttgtccaaccgggcaggtcacttagattgtcatgtgcggcgagcggttttacctttgacgattatgcgatgcactgggtccgccaggcaccggggaaggggctcgaatgggtatcaggaatctcgtggaactcggggtccacgggctatgcggactcggtcaaggggcgcttcacaatctcaagggacaatgccaaaaactcgctctatctccagatgaactcattgcgagctgaggacacggcgctttactactgtgcgcgggatttgggttacaaccaatggcttgaagggtttgattactgggggcagggaactctcgtgaccgtgtccagcgcatcgacgggaggaggaggttccgggggtgggggaagcgggggtggagggtcatcgtcagagctgacgcaagatcccgcggtatccgtcgcccttgggcagaccgtcaggattacgtgccagggagactcacttagaagctactacgcttcctggtatcagcaaaagccgggacaggcacccgtgttggtgatctacgggaagaataaccggcccagcgggattcctgaccgcttttcgggctcctcatcggggaacacagcctcgttgactatcacgggtgcgcaagccgaggacgaggcagactattactgtatgtcgcgagatcaccctggtaatcagtgggtctttgggggaggaactaaggtaacggtattggggtgataa

SEQ ID NO: 19 - protein, 715 aa, Artificial Sequence
  Description of Artificial Sequence: Synthetic polypeptide
  SF-G1-B69
EVQLLQSGGGLVQPGGSLRLSCAASGFTFSVYPMHWVRQAPGKGLEWVSSISSSGGATRYADSVKGRFTISRDNSKNTLYLQMNSLRAEDTAVYYCAKDFYDILTGNAFDIWGQGTTVTVSSASTKGPSVFPLAPSSKSTSGGTAALGCLVKDYFPEPVTVSWNSGALTSGVHTFPAVLQSSGLYSLSSVVTVPSSSLGTQTYICNVNHKPSNTKVDKKVEPKSCDKTHTCPPCPAPELLGGPSVFLFPPKPKDTLMISRTPEVTCVVVDVSHEDPEVKFNWYVDGVEVHNAKTKPREEQYNSTYRVVSVLTVLHQDWLNGKEYKCKVSNKALPAPIEKTISKAKGQPREPQVYTLPPSREEMTKNQVSLTCLVKGFYPSDIAVEWESNGQPENNYKTTPPVLDSDGSFFLYSKLTVDKSRWQQGNVFSCSVMHEALHNHYTQKSLSLSPGGGGGSGGGGSGGGGSEVQLVESGGGLVQPGRSLRLSCAASGFTFDDYAMHWVRQAPGKGLEWVSGISWNSGSVGYADSVKGRFTISRDNAKNSLYLQMNSLRAEDTALYYCARDLGYNQWLEGFDYWGQGTLVTVSSASTGGGGSGGGGSGGGGSSSELTQDPAVSVALGQTVRITCQGDSLRSYYASWYQQKPGQAPVLVIYGKNNRPSGIPDRFSGSSSGNTASLTITGAQAEDEADYYCMSRDSPGNQWVFGGGTKVTVLG

SEQ ID NO: 20 - DNA, 2154 bp, Artificial Sequence
  Description of Artificial Sequence: Synthetic polynucleotide
  SF-G1-B69
gaggtccagctcctccagtcaggtggaggactggtgcaacccggaggttcacttcggctgtcgtgtgcggcatcgggattcacgttttcggtgtatccgatgcattgggtgcgacaagctccgggcaaagggcttgaatgggtgtcgtccatctcgtcgtcgggaggagcaacgaggtatgccgattccgtaaagggtaggttcaccatctcacgcgacaattccaagaatacgttgtacctgcagatgaattcgcttagggcagaagatacggccgtgtactattgcgcaaaagatttctatgacattcttactggtaatgcgttcgatatctggggtcagggaactaccgtaacggtgtcgagcgctagcactaagggaccgtccgtgtttcccctcgcgcctagctcgaagagcacatcgggaggaacagcggcgctcggctgtctcgtcaaagactacttccccgagccggtgaccgtgagctggaattccggagcgttgacctcaggggtgcatacattccctgccgtactgcaatcatcagggctctactcattgtcgagcgtagtgactgtaccgtcgtcatcgctcggaacgcagacgtacatctgcaatgtcaatcacaagccctccaatactaaggtagataagaaagtagaaccgaagtcgtgtgataagacccatacatgccctccgtgccccgcaccggaactcttgggtggcccatcagtctttctgttcccgccaaagcccaaagacacactgatgatttcgcgcacgcccgaagtcacttgcgtcgtggtggatgtgtcgcatgaggacccggaggtcaagttcaactggtacgtcgatggtgtagaagtccacaacgccaagaccaagcctcgggaggagcagtataactccacctaccgggtagtgagcgtgcttacagtgctccatcaggactggctgaacggcaaagaatacaaatgcaaagtcagcaacaaagcgctgccagcgcccatcgagaaaacaattagcaaagcgaaagggcagcccagagaacctcaagtgtatacattgccgccgtcgcgggaggaaatgacaaagaatcaggtatccctgacgtgtcttgtgaaaggcttttacccatccgacattgcggtagagtgggagtcgaatgggcaacccgagaacaactataagacgactcccccagtcttggattcagacggatcctttttcttgtactcgaaactcacagtcgacaagtccagatggcagcaggggaacgtgttcagctgcagcgtgatgcacgaggcccttcacaaccactatacgcagaaatcattaagcttatcgccaggtaaaggaggtggcgggagcgggggagggggatccggtggcggagggtcggaagtgcagctggtggagagcggaggtgggcttgtccaaccgggcaggtcacttagattgtcatgtgcggcgagcggttttacctttgacgattatgcgatgcactgggtccgccaggcaccggggaaggggctcgaatgggtatcaggaatctcgtggaactcggggtccgtgggctatgcggactcggtcaaggggcgcttcacaatctcaagggacaatgccaaaaactcgctctacttgcagatgaactcattgcgagctgaggacacggcgctttactactgtgcgcgggatttgggctacaatcaatggttggaagggtttgattactgggggcagggaactctcgtgaccgtgtccagcgcatcgacgggaggaggaggttccgggggtgggggaagcgggggtggagggtcatcgtcagagctgacgcaagatcccgcggtatccgtcgcccttgggcagaccgtcaggattacgtgccagggagactcacttagaagctactacgcttcctggtatcagcaaaagccgggacaggcacccgtgttggtgatctacgggaagaataaccggcccagcgggattcctgaccgcttttcgggctcctcatcggggaacacagcctcgttgactatcacgggtgcgcaagccgaggacgaggcagactattactgtatgtcgcgagattcccctggtaatcagtgggtctttgggggaggaactaaggtaacggtattggggtgataa

SEQ ID NO: 21 - protein, 720 aa, Artificial Sequence
  Description of Artificial Sequence: Synthetic polypeptide
  P4-G1-C8
EVQLLQSGGGLVQPGGSLRLSCAASGFMFSRYPMHWVRQAPGKGLEWVGSISGSGGATPYADSVKGRFTISRDNSKNTLYLQMNSLRAEDTAVYYCAKDFYQILTGNAFDYWGQGTTVTVSSASTKGPSVFPLAPSSKSTSGGTAALGCLVKDYFPEPVTVSWNSGALTSGVHTFPAVLQSSGLYSLSSVVTVPSSSLGTQTYICNVNHKPSNTKVDKKVEPKSCDKTHTCPPCPAPELLGGPSVFLFPPKPKDTLMISRTPEVTCVVVDVSHEDPEVKFNWYVDGVEVHNAKTKPREEQYNSTYRVVSVLTVLHQDWLNGKEYKCKVSNKALPAPIEKTISKAKGQPREPQVYTLPPSREEMTKNQVSLTCLVKGFYPSDIAVEWESNGQPENNYKTTPPVLDSDGSFFLYSKLTVDKSRWQQGNVFSCSVMHEALHNHYTQKSLSLSPGGGGGSGGGGSGGGGSQVQLVQSGGGLVQPGGSLRLSCAASGFTFDDYAMHWVRQAPGKGLEWVAGISWNSGSIGYADSVKGRFTISRDNAKNSLYLQMNSLRPEDTAVYYCARDLGYNQWVEGFDYWGQGTLVTVSSASTGGGGSGGGGSGGGGSGGGGSSYELTQDPAVSVALGQTVRITCQGDSLRSYYASWYQQKPGQAPVLVIYGKNNRPSGIPDRFSGSTSGNSASLTITGAQAEDEADYYCNSRDSSGNHWVFGGGTKVTVLG

SEQ ID NO: 22 - DNA, 2166 bp, Artificial Sequence
  Description of Artificial Sequence: Synthetic polynucleotide
  P4-G1-C8
gaagtccagctgctccaaagcggcggaggactcgtacagccgggagggagcttgaggctcagctgcgctgcgtccggtttcatgttctcaagatatcccatgcactgggtgcggcaggcaccaggaaagggactggagtgggtcggttcgatttcgggctccggtggggcaaccccttatgccgattccgtcaaagggcgctttaccatttcaagggataacagcaagaacactttgtacttgcaaatgaattcgcttcgagcggaggacacagccgtgtactactgtgcgaaagacttttaccagatcttgacaggtaatgccttcgactattgggggcaggggacaacggtaacggtgtcgtccgctagcacgaaggggcctagcgtctttccgctcgccccctcgtcaaaatcaacgtcgggtggaacggccgcattgggttgtctcgtaaaggactactttccggaacccgtcaccgtatcgtggaattcaggcgccctgacttccggggtccacacctttcccgctgtcttgcagtcctcgggtttgtattcactgtcgtcagtggtgacagtaccatcatcctcactgggaactcaaacgtacatctgcaacgtgaaccacaagccgagcaacactaaggtggataagaaggtagagcccaagtcatgcgacaaaacgcatacatgcccgccatgccccgcaccagaacttttgggaggtccgtcagtgtttctctttccgcctaagcccaaagacacactgatgatttcccggacgcccgaagtcacttgtgtggtcgtcgacgtgtcccatgaagatcccgaagtaaagttcaactggtatgtcgacggtgtggaagtccacaatgcaaaaaccaagcccagggaagaacagtacaacagcacatatcgagtggtgagcgtgttgaccgtgctgcaccaagactggctcaatggaaaggagtacaaatgcaaagtgtccaacaaggcactgcctgcgcccattgagaaaacgatttcgaaagcaaagggacagccaagagaaccccaagtgtatacccttcccccgtcgcgcgaggaaatgacgaagaaccaggtatcgttgacgtgtcttgtaaagggattctatccctcggacatcgcggtcgagtgggagtccaacggacagccagagaataactacaaaaccacaccgcctgtgctggattccgacgggtcgtttttcttgtattcgaagcttacggtagacaaaagccggtggcagcagggtaatgtgttcagctgctcagtaatgcacgaggctctccataatcattacactcagaagtccctttccctttcgccgggagggggtgggggatccggcggaggtgggtcgggaggtggaggatcacaagtgcaattggtacagtcgggaggcgggcttgtgcaacccggagggtcactgcgcctttcatgtgcggcgagcggtttcacgttcgatgattatgcgatgcattgggtacggcaggcacctggcaaagggttggagtgggtagccggaatctcgtggaatagcgggagcatcggttatgcggattccgtcaaagggaggtttacaatttcgagggacaatgcgaagaacagcctgtatctccaaatgaattcgctcaggcccgaagataccgccgtctactactgcgcgagggacttgggatacaaccagtgggtggaagggtttgattactgggggcaggggactctggtaactgtctcatcggcatcgactggtggtggcgggtccggagggggaggaagcggaggaggcgggagcggaggcggtgggtccagctacgaactgactcaagatccggccgtatcggtggccctcggacaaacagtgcgaatcacctgtcagggggatagccttagatcgtactacgcttcgtggtatcagcaaaagcccggacaggcaccagtgcttgtgatctacggaaagaacaatagaccgagcggaattccggatcggttttcgggttcgacttccggaaattcggcgtcgctcacgatcaccggagctcaggcagaggatgaagcggattactattgtaattcccgcgattcgtcggggaatcattgggtgttcggtgggggtacaaaggtaactgtactcggctgataa

SEQ ID NO: 23 - protein, 715 aa, Artificial Sequence
  Description of Artificial Sequence: Synthetic polypeptide
  P4-G1-P1
EVQLLQSGGGLVQPGGSLRLSCAASGFMFSRYPMHWVRQAPGKGLEWVGSISGSGGATPYADSVKGRFTISRDNSKNTLYLQMNSLRAEDTAVYYCAKDFYQILTGNAFDYWGQGTTVTVSSASTKGPSVFPLAPSSKSTSGGTAALGCLVKDYFPEPVTVSWNSGALTSGVHTFPAVLQSSGLYSLSSVVTVPSSSLGTQTYICNVNHKPSNTKVDKKVEPKSCDKTHTCPPCPAPELLGGPSVFLFPPKPKDTLMISRTPEVTCVVVDVSHEDPEVKFNWYVDGVEVHNAKTKPREEQYNSTYRVVSVLTVLHQDWLNGKEYKCKVSNKALPAPIEKTISKAKGQPREPQVYTLPPSREEMTKNQVSLTCLVKGFYPSDIAVEWESNGQPENNYKTTPPVLDSDGSFFLYSKLTVDKSRWQQGNVFSCSVMHEALHNHYTQKSLSLSPGGGGGSGGGGSGGGGSEVQLVESGGGLVQPGRSLRLSCAASGFTFDDYAMHWVRQAPGKGLEWVSGISWDSGSTGYADSVKGRFTISRDNAKNSLYLQMNSLRAEDTALYYCARDLGAYQWVEGFDYWGQGTLVTVSSASTGGGGSGGGGSGGGGSSSELTQDPAVSVALGQTVRITCQGDSLRSYYASWYQQKPGQAPVLVIYGKNNRPSGIPDRFSGSSSGNTASLTITGAQAEDEADYYCESRDSPGNQWVFGGGTKVTVLG

SEQ ID NO: 24 - DNA, 2154 bp, Artificial Sequence
  Description of Artificial Sequence: Synthetic polynucleotide
  P4-G1-P1
gaagtccagctgctccaaagcggcggaggactcgtacagccgggagggagcttgaggctcagctgcgctgcgtccggtttcatgttctcaagatatcccatgcactgggtgcggcaggcaccaggaaagggactggagtgggtcggttcgatttcgggctccggtggggcaaccccttatgccgattccgtcaaagggcgctttaccatttcaagggataacagcaagaacactttgtacttgcaaatgaattcgcttcgagcggaggacacagccgtgtactactgtgcgaaagacttttaccagatcttgacaggtaatgccttcgactattgggggcaggggacaacggtaacggtgtcgtccgctagcactaagggaccgtccgtgtttcccctcgcgcctagctcgaagagcacatcgggaggaacagcggcgctcggctgtctcgtcaaagactacttccccgagccggtgaccgtgagctggaattccggagcgttgacctcaggggtgcatacattccctgccgtactgcaatcatcagggctctactcattgtcgagcgtagtgactgtaccgtcgtcatcgctcggaacgcagacgtacatctgcaatgtcaatcacaagccctccaatactaaggtagataagaaagtagaaccgaagtcgtgtgataagacccatacatgccctccgtgccccgcaccggaactcttgggtggcccatcagtctttctgttcccgccaaagcccaaagacacactgatgatttcgcgcacgcccgaagtcacttgcgtcgtggtggatgtgtcgcatgaggacccggaggtcaagttcaactggtacgtcgatggtgtagaagtccacaacgccaagaccaagcctcgggaggagcagtataactccacctaccgggtagtgagcgtgcttacagtgctccatcaggactggctgaacggcaaagaatacaaatgcaaagtcagcaacaaagcgctgccagcgcccatcgagaaaacaattagcaaagcgaaagggcagcccagagaacctcaagtgtatacattgccgccgtcgcgggaggaaatgacaaagaatcaggtatccctgacgtgtcttgtgaaaggcttttacccatccgacattgcggtagagtgggagtcgaatgggcaacccgagaacaactataagacgactcccccagtcttggattcagacggatcctttttcttgtactcgaaactcacagtcgacaagtccagatggcagcaggggaacgtgttcagctgcagcgtgatgcacgaggcccttcacaaccactatacgcagaaatcattaagcttatcgccaggtaaaggaggtggcgggagcgggggagggggatccggtggcggagggtcggaagtgcagctggtggagagcggaggtgggcttgtccaaccgggcaggtcacttagattgtcatgtgcggcgagcggttttacctttgacgattatgcgatgcactgggtccgccaggcaccggggaaggggctcgaatgggtatcaggaatctcgtgggactcggggtccacgggctatgcggactcggtcaaggggcgcttcacaatctcaagggacaatgccaaaaactcgctctatcttcagatgaactcattgcgagctgaggacacggcgctttactactgtgcgcgggatttgggtgcctatcaatgggtagaagggtttgattactgggggcagggaactctcgtgaccgtgtccagcgcatcgacgggaggaggaggttccgggggtgggggaagcgggggtggagggtcatcgtcagagctgacgcaagatcccgcggtatccgtcgcccttgggcagaccgtcaggattacgtgccagggagactcacttagaagctactacgcttcctggtatcagcaaaagccgggacaggcacccgtgttggtgatctacgggaagaataaccggcccagcgggattcctgaccgcttttcgggctcctcatcggggaacacagcctcgttgactatcacgggtgcgcaagccgaggacgaggcagactattactgtgaatcgcgagattcccctggtaatcagtgggtctttgggggaggaactaaggtaacggtattggggtgataa

SEQ ID NO: 25 - protein, 720 aa, Artificial Sequence
  Description of Artificial Sequence: Synthetic polypeptide
  P4-G1-M1.3
EVQLLQSGGGLVQPGGSLRLSCAASGFMFSRYPMHWVRQAPGKGLEWVGSISGSGGATPYADSVKGRFTISRDNSKNTLYLQMNSLRAEDTAVYYCAKDFYQILTGNAFDYWGQGTTVTVSSASTKGPSVFPLAPSSKSTSGGTAALGCLVKDYFPEPVTVSWNSGALTSGVHTFPAVLQSSGLYSLSSVVTVPSSSLGTQTYICNVNHKPSNTKVDKKVEPKSCDKTHTCPPCPAPELLGGPSVFLFPPKPKDTLMISRTPEVTCVVVDVSHEDPEVKFNWYVDGVEVHNAKTKPREEQYNSTYRVVSVLTVLHQDWLNGKEYKCKVSNKALPAPIEKTISKAKGQPREPQVYTLPPSREEMTKNQVSLTCLVKGFYPSDIAVEWESNGQPENNYKTTPPVLDSDGSFFLYSKLTVDKSRWQQGNVFSCSVMHEALHNHYTQKSLSLSPGGGGGSGGGGSGGGGSQVQLVQSGGGLVQPGGSLRLSCAASGFTFDDYAMHWVRQAPGKGLEWVAGISWDSGSTGYADSVKGRFTISRDNAKNSLYLQMNSLRAEDTALYYCARDLGAYQWVEGFDYWGQGTLVTVSSASTGGGGSGGGGSGGGGSGGGGSSYELTQDPAVSVALGQTVRITCQGDSLRSYYASWYQQKPGQAPVLVIYGKNNRPSGIPDRFSGSTSGNSASLTITGAQAEDEADYYCNSRDSPGNQWVFGGGTKVTVLG

SEQ ID NO: 26 - DNA, 2169 bp, Artificial Sequence
  Description of Artificial Sequence: Synthetic polynucleotide
  P4-G1-M1.3
gaagtccagctgctccaaagcggcggaggactcgtacagccgggagggagcttgaggctcagctgcgctgcgtccggtttcatgttctcaagatatcccatgcactgggtgcggcaggcaccaggaaagggactggagtgggtcggttcgatttcgggctccggtggggcaaccccttatgccgattccgtcaaagggcgctttaccatttcaagggataacagcaagaacactttgtacttgcaaatgaattcgcttcgagcggaggacacagccgtgtactactgtgcgaaagacttttaccagatcttgacaggtaatgccttcgactattgggggcaggggacaacggtaacggtgtcgtccgctagcactaagggaccgtccgtgtttcccctcgcgcctagctcgaagagcacatcgggaggaacagcggcgctcggctgtctcgtcaaagactacttccccgagccggtgaccgtgagctggaattccggagcgttgacctcaggggtgcatacattccctgccgtactgcaatcatcagggctctactcattgtcgagcgtagtgactgtaccgtcgtcatcgctcggaacgcagacgtacatctgcaatgtcaatcacaagccctccaatactaaggtagataagaaagtagaaccgaagtcgtgtgataagacccatacatgccctccgtgccccgcaccggaactcttgggtggcccatcagtctttctgttcccgccaaagcccaaagacacactgatgatttcgcgcacgcccgaagtcacttgcgtcgtggtggatgtgtcgcatgaggacccggaggtcaagttcaactggtacgtcgatggtgtagaagtccacaacgccaagaccaagcctcgggaggagcagtataactccacctaccgggtagtgagcgtgcttacagtgctccatcaggactggctgaacggcaaagaatacaaatgcaaagtcagcaacaaagcgctgccagcgcccatcgagaaaacaattagcaaagcgaaagggcagcccagagaacctcaagtgtatacattgccgccgtcgcgggaggaaatgacaaagaatcaggtatccctgacgtgtcttgtgaaaggcttttacccatccgacattgcggtagagtgggagtcgaatgggcaacccgagaacaactataagacgactcccccagtcttggattcagacggatcctttttcttgtactcgaaactcacagtcgacaagtccagatggcagcaggggaacgtgttcagctgcagcgtgatgcacgaggcccttcacaaccactatacgcagaaatcattaagcttatcgccaggtaaaggaggtggcgggagcgggggagggggatccggtggcggagggtcgcaagtgcagctggtgcaaagcggaggtgggcttgtccaacccggaggctcacttagattgtcatgtgcggcgagcggttttacctttgacgattatgcgatgcactgggtccgccaggcaccggggaaggggctcgaatgggtagccggaatctcgtgggactcggggtccacgggctatgcggactcggtcaaggggcgcttcacaatctcaagggacaatgccaaaaactcgctctatctgcagatgaactcattgcgagctgaggacacggcgctttactactgtgcgcgggatttgggtgcctatcaatgggtagaagggtttgattactgggggcagggaactctcgtgaccgtgtccagcgcatcgacgggaggaggaggttccgggggtgggggaagcgggggtggagggtcaggaggtgggggatcgtcatacgagctgacgcaagatcccgcggtatccgtcgcccttgggcagaccgtcaggattacgtgccagggagactcacttagaagctactacgcttcctggtatcagcaaaagccgggacaggcacccgtgttggtgatctacgggaagaataaccggcccagcgggattcctgaccgcttttcgggctccacctcagggaactcggcctcgttgactatcacgggtgcgcaagccgaggacgaggcagactattactgtaactcgcgagattcccctggtaatcagtgggtctttgggggaggaactaaggtaacggtattggggtgataa

SEQ ID NO: 27 - protein, 715 aa, Artificial Sequence
  Description of Artificial Sequence: Synthetic polypeptide
  P4-G1-M27
EVQLLQSGGGLVQPGGSLRLSCAASGFMFSRYPMHWVRQAPGKGLEWVGSISGSGGATPYADSVKGRFTISRDNSKNTLYLQMNSLRAEDTAVYYCAKDFYQILTGNAFDYWGQGTTVTVSSASTKGPSVFPLAPSSKSTSGGTAALGCLVKDYFPEPVTVSWNSGALTSGVHTFPAVLQSSGLYSLSSVVTVPSSSLGTQTYICNVNHKPSNTKVDKKVEPKSCDKTHTCPPCPAPELLGGPSVFLFPPKPKDTLMISRTPEVTCVVVDVSHEDPEVKFNWYVDGVEVHNAKTKPREEQYNSTYRVVSVLTVLHQDWLNGKEYKCKVSNKALPAPIEKTISKAKGQPREPQVYTLPPSREEMTKNQVSLTCLVKGFYPSDIAVEWESNGQPENNYKTTPPVLDSDGSFFLYSKLTVDKSRWQQGNVFSCSVMHEALHNHYTQKSLSLSPGGGGGSGGGGSGGGGSEVQLVESGGGLVQPGRSLRLSCAASGFTFDDYAMHWVRQAPGKGLEWVSGISWNSGSTGYADSVKGRFTISRDNAKNSLYLQMNSLRAEDTALYYCARDLGFNQWVDGFDYWGQGTLVTVSSASTGGGGSGGGGSGGGGSSSELTQDPAVSVALGQTVRITCQGDSLRSYYASWYQQKPGQAPVLVIYGKNNRPSGIPDRFSGSSSGNTASLTITGAQAEDEADYYCNSRDTPGDQWVFGGGTKVTVLG

SEQ ID NO: 28 - DNA, 2154 bp, Artificial Sequence
  Description of Artificial Sequence: Synthetic polynucleotide
  P4-G1-M27
gaagtccagctgctccaaagcggcggaggactcgtacagccgggagggagcttgaggctcagctgcgctgcgtccggtttcatgttctcaagatatcccatgcactgggtgcggcaggcaccaggaaagggactggagtgggtcggttcgatttcgggctccggtggggcaaccccttatgccgattccgtcaaagggcgctttaccatttcaagggataacagcaagaacactttgtacttgcaaatgaattcgcttcgagcggaggacacagccgtgtactactgtgcgaaagacttttaccagatcttgacaggtaatgccttcgactattgggggcaggggacaacggtaacggtgtcgtccgctagcactaagggaccgtccgtgtttcccctcgcgcctagctcgaagagcacatcgggaggaacagcggcgctcggctgtctcgtcaaagactacttccccgagccggtgaccgtgagctggaattccggagcgttgacctcaggggtgcatacattccctgccgtactgcaatcatcagggctctactcattgtcgagcgtagtgactgtaccgtcgtcatcgctcggaacgcagacgtacatctgcaatgtcaatcacaagccctccaatactaaggtagataagaaagtagaaccgaagtcgtgtgataagacccatacatgccctccgtgccccgcaccggaactcttgggtggcccatcagtctttctgttcccgccaaagcccaaagacacactgatgatttcgcgcacgcccgaagtcacttgcgtcgtggtggatgtgtcgcatgaggacccggaggtcaagttcaactggtacgtcgatggtgtagaagtccacaacgccaagaccaagcctcgggaggagcagtataactccacctaccgggtagtgagcgtgcttacagtgctccatcaggactggctgaacggcaaagaatacaaatgcaaagtcagcaacaaagcgctgccagcgcccatcgagaaaacaattagcaaagcgaaagggcagcccagagaacctcaagtgtatacattgccgccgtcgcgggaggaaatgacaaagaatcaggtatccctgacgtgtcttgtgaaaggcttttacccatccgacattgcggtagagtgggagtcgaatgggcaacccgagaacaactataagacgactcccccagtcttggattcagacggatcctttttcttgtactcgaaactcacagtcgacaagtccagatggcagcaggggaacgtgttcagctgcagcgtgatgcacgaggcccttcacaaccactatacgcagaaatcattaagcttatcgccaggtaaaggaggtggcgggagcgggggagggggatccggtggcggagggtcggaagtgcagctggtggagagcggaggtgggcttgtccaaccgggcaggtcacttagattgtcatgtgcggcgagcggttttacctttgacgattatgcgatgcactgggtccgccaggcaccggggaaggggctcgaatgggtatcaggaatctcgtggaattcggggtccacgggctatgcggactcggtcaaggggcgcttcacaatctcaagggacaatgccaaaaactcgctctatttgcaaatgaactcattgcgagctgaggacacggcgctttactactgtgcgcgggatttgggctttaaccaatgggtagacgggtttgattactgggggcagggaactctcgtgaccgtgtccagcgcatcgacgggaggaggaggttccgggggtgggggaagcgggggtggagggtcatcgtcagagctgacgcaagatcccgcggtatccgtcgcccttgggcagaccgtcaggattacgtgccagggagactcacttagaagctactacgcttcctggtatcagcaaaagccgggacaggcacccgtgttggtgatctacgggaagaataaccggcccagcgggattcctgaccgcttttcgggctcctcatcggggaacacagcctcgttgactatcacgggtgcgcaagccgaggacgaggcagactattactgtaactcgcgagatacgcctggtgaccagtgggtctttgggggaggaactaaggtaacggtattggggtgataa

SEQ ID NO: 29 - protein, 715 aa, Artificial Sequence
  Description of Artificial Sequence: Synthetic polypeptide
  P4-G1-P6
EVQLLQSGGGLVQPGGSLRLSCAASGFMFSRYPMHWVRQAPGKGLEWVGSISGSGGATPYADSVKGRFTISRDNSKNTLYLQMNSLRAEDTAVYYCAKDFYQILTGNAFDYWGQGTTVTVSSASTKGPSVFPLAPSSKSTSGGTAALGCLVKDYFPEPVTVSWNSGALTSGVHTFPAVLQSSGLYSLSSVVTVPSSSLGTQTYICNVNHKPSNTKVDKKVEPKSCDKTHTCPPCPAPELLGGPSVFLFPPKPKDTLMISRTPEVTCVVVDVSHEDPEVKFNWYVDGVEVHNAKTKPREEQYNSTYRVVSVLTVLHQDWLNGKEYKCKVSNKALPAPIEKTISKAKGQPREPQVYTLPPSREEMTKNQVSLTCLVKGFYPSDIAVEWESNGQPENNYKTTPPVLDSDGSFFLYSKLTVDKSRWQQGNVFSCSVMHEALHNHYTQKSLSLSPGGGGGSGGGGSGGGGSEVQLVESGGGLVQPGRSLRLSCAASGFTFDDYAMHWVRQAPGKGLEWVSGISWNSGSTGYADSVKGRFTISRDNAKNSLYLQMNSLRAEDTALYYCARDLGYNQWLEGFDYWGQGTLVTVSSASTGGGGSGGGGSGGGGSSSELTQDPAVSVALGQTVRITCQGDSLRSYYASWYQQKPGQAPVLVIYGKNNRPSGIPDRFSGSSSGNTASLTITGAQAEDEADYYCMSRDHPGNQWVFGGGTKVTVLG

SEQ ID NO: 30 - DNA, 2154 bp, Artificial Sequence
  Description of Artificial Sequence: Synthetic polynucleotide
  P4-G1-P6
gaagtccagctgctccaaagcggcggaggactcgtacagccgggagggagcttgaggctcagctgcgctgcgtccggtttcatgttctcaagatatcccatgcactgggtgcggcaggcaccaggaaagggactggagtgggtcggttcgatttcgggctccggtggggcaaccccttatgccgattccgtcaaagggcgctttaccatttcaagggataacagcaagaacactttgtacttgcaaatgaattcgcttcgagcggaggacacagccgtgtactactgtgcgaaagacttttaccagatcttgacaggtaatgccttcgactattgggggcaggggacaacggtaacggtgtcgtccgctagcactaagggaccgtccgtgtttcccctcgcgcctagctcgaagagcacatcgggaggaacagcggcgctcggctgtctcgtcaaagactacttccccgagccggtgaccgtgagctggaattccggagcgttgacctcaggggtgcatacattccctgccgtactgcaatcatcagggctctactcattgtcgagcgtagtgactgtaccgtcgtcatcgctcggaacgcagacgtacatctgcaatgtcaatcacaagccctccaatactaaggtagataagaaagtagaaccgaagtcgtgtgataagacccatacatgccctccgtgccccgcaccggaactcttgggtggcccatcagtctttctgttcccgccaaagcccaaagacacactgatgatttcgcgcacgcccgaagtcacttgcgtcgtggtggatgtgtcgcatgaggacccggaggtcaagttcaactggtacgtcgatggtgtagaagtccacaacgccaagaccaagcctcgggaggagcagtataactccacctaccgggtagtgagcgtgcttacagtgctccatcaggactggctgaacggcaaagaatacaaatgcaaagtcagcaacaaagcgctgccagcgcccatcgagaaaacaattagcaaagcgaaagggcagcccagagaacctcaagtgtatacattgccgccgtcgcgggaggaaatgacaaagaatcaggtatccctgacgtgtcttgtgaaaggcttttacccatccgacattgcggtagagtgggagtcgaatgggcaacccgagaacaactataagacgactcccccagtcttggattcagacggatcctttttcttgtactcgaaactcacagtcgacaagtccagatggcagcaggggaacgtgttcagctgcagcgtgatgcacgaggcccttcacaaccactatacgcagaaatcattaagcttatcgccaggtaaaggaggtggcgggagcgggggagggggatccggtggcggagggtcggaagtgcagctggtggagagcggaggtgggcttgtccaaccgggcaggtcacttagattgtcatgtgcggcgagcggttttacctttgacgattatgcgatgcactgggtccgccaggcaccggggaaggggctcgaatgggtatcaggaatctcgtggaactcggggtccacgggctatgcggactcggtcaaggggcgcttcacaatctcaagggacaatgccaaaaactcgctctatctccagatgaactcattgcgagctgaggacacggcgctttactactgtgcgcgggatttgggttacaaccaatggcttgaagggtttgattactgggggcagggaactctcgtgaccgtgtccagcgcatcgacgggaggaggaggttccgggggtgggggaagcgggggtggagggtcatcgtcagagctgacgcaagatcccgcggtatccgtcgcccttgggcagaccgtcaggattacgtgccagggagactcacttagaagctactacgcttcctggtatcagcaaaagccgggacaggcacccgtgttggtgatctacgggaagaataaccggcccagcgggattcctgaccgcttttcgggctcctcatcggggaacacagcctcgttgactatcacgggtgcgcaagccgaggacgaggcagactattactgtatgtcgcgagatcaccctggtaatcagtgggtctttgggggaggaactaaggtaacggtattggggtgataa

SEQ ID NO: 31 - protein, 715 aa, Artificial Sequence
  Description of Artificial Sequence: Synthetic polypeptide
  P4-G1-B69
EVQLLQSGGGLVQPGGSLRLSCAASGFMFSRYPMHWVRQAPGKGLEWVGSISGSGGATPYADSVKGRFTISRDNSKNTLYLQMNSLRAEDTAVYYCAKDFYQILTGNAFDYWGQGTTVTVSSASTKGPSVFPLAPSSKSTSGGTAALGCLVKDYFPEPVTVSWNSGALTSGVHTFPAVLQSSGLYSLSSVVTVPSSSLGTQTYICNVNHKPSNTKVDKKVEPKSCDKTHTCPPCPAPELLGGPSVFLFPPKPKDTLMISRTPEVTCVVVDVSHEDPEVKFNWYVDGVEVHNAKTKPREEQYNSTYRVVSVLTVLHQDWLNGKEYKCKVSNKALPAPIEKTISKAKGQPREPQVYTLPPSREEMTKNQVSLTCLVKGFYPSDIAVEWESNGQPENNYKTTPPVLDSDGSFFLYSKLTVDKSRWQQGNVFSCSVMHEALHNHYTQKSLSLSPGGGGGSGGGGSGGGGSEVQLVESGGGLVQPGRSLRLSCAASGFTFDDYAMHWVRQAPGKGLEWVSGISWNSGSVGYADSVKGRFTISRDNAKNSLYLQMNSLRAEDTALYYCARDLGYNQWLEGFDYWGQGTLVTVSSASTGGGGSGGGGSGGGGSSSELTQDPAVSVALGQTVRITCQGDSLRSYYASWYQQKPGQAPVLVIYGKNNRPSGIPDRFSGSSSGNTASLTITGAQAEDEADYYCMSRDSPGNQWVFGGGTKVTVLG

SEQ ID NO: 32 - DNA, 2154 bp, Artificial Sequence
  Description of Artificial Sequence: Synthetic polynucleotide
  P4-G1-B69
gaagtccagctgctccaaagcggcggaggactcgtacagccgggagggagcttgaggctcagctgcgctgcgtccggtttcatgttctcaagatatcccatgcactgggtgcggcaggcaccaggaaagggactggagtgggtcggttcgatttcgggctccggtggggcaaccccttatgccgattccgtcaaagggcgctttaccatttcaagggataacagcaagaacactttgtacttgcaaatgaattcgcttcgagcggaggacacagccgtgtactactgtgcgaaagacttttaccagatcttgacaggtaatgccttcgactattgggggcaggggacaacggtaacggtgtcgtccgctagcactaagggaccgtccgtgtttcccctcgcgcctagctcgaagagcacatcgggaggaacagcggcgctcggctgtctcgtcaaagactacttccccgagccggtgaccgtgagctggaattccggagcgttgacctcaggggtgcatacattccctgccgtactgcaatcatcagggctctactcattgtcgagcgtagtgactgtaccgtcgtcatcgctcggaacgcagacgtacatctgcaatgtcaatcacaagccctccaatactaaggtagataagaaagtagaaccgaagtcgtgtgataagacccatacatgccctccgtgccccgcaccggaactcttgggtggcccatcagtctttctgttcccgccaaagcccaaagacacactgatgatttcgcgcacgcccgaagtcacttgcgtcgtggtggatgtgtcgcatgaggacccggaggtcaagttcaactggtacgtcgatggtgtagaagtccacaacgccaagaccaagcctcgggaggagcagtataactccacctaccgggtagtgagcgtgcttacagtgctccatcaggactggctgaacggcaaagaatacaaatgcaaagtcagcaacaaagcgctgccagcgcccatcgagaaaacaattagcaaagcgaaagggcagcccagagaacctcaagtgtatacattgccgccgtcgcgggaggaaatgacaaagaatcaggtatccctgacgtgtcttgtgaaaggcttttacccatccgacattgcggtagagtgggagtcgaatgggcaacccgagaacaactataagacgactcccccagtcttggattcagacggatcctttttcttgtactcgaaactcacagtcgacaagtccagatggcagcaggggaacgtgttcagctgcagcgtgatgcacgaggcccttcacaaccactatacgcagaaatcattaagcttatcgccaggtaaaggaggtggcgggagcgggggagggggatccggtggcggagggtcggaagtgcagctggtggagagcggaggtgggcttgtccaaccgggcaggtcacttagattgtcatgtgcggcgagcggttttacctttgacgattatgcgatgcactgggtccgccaggcaccggggaaggggctcgaatgggtatcaggaatctcgtggaactcggggtccgtgggctatgcggactcggtcaaggggcgcttcacaatctcaagggacaatgccaaaaactcgctctacttgcagatgaactcattgcgagctgaggacacggcgctttactactgtgcgcgggatttgggctacaatcaatggttggaagggtttgattactgggggcagggaactctcgtgaccgtgtccagcgcatcgacgggaggaggaggttccgggggtgggggaagcgggggtggagggtcatcgtcagagctgacgcaagatcccgcggtatccgtcgcccttgggcagaccgtcaggattacgtgccagggagactcacttagaagctactacgcttcctggtatcagcaaaagccgggacaggcacccgtgttggtgatctacgggaagaataaccggcccagcgggattcctgaccgcttttcgggctcctcatcggggaacacagcctcgttgactatcacgggtgcgcaagccgaggacgaggcagactattactgtatgtcgcgagattcccctggtaatcagtgggtctttgggggaggaactaaggtaacggtattggggtgataa

SEQ ID NO: 33 - protein, 720 aa, Artificial Sequence
  Description of Artificial Sequence: Synthetic polypeptide
  M78 -G1-C8
EVQLLQSGGGLVQPGGSLRLSCAASGFDFSSYPMHWVRQAPGKGLEWVGSISSSGGATPYADSVKGRFTISRDNSKNTLYLQMNSLRPEDTAVYYCAKDFYTILTGNAFDMWGQGTSVTVSSASTKGPSVFPLAPSSKSTSGGTAALGCLVKDYFPEPVTVSWNSGALTSGVHTFPAVLQSSGLYSLSSVVTVPSSSLGTQTYICNVNHKPSNTKVDKKVEPKSCDKTHTCPPCPAPELLGGPSVFLFPPKPKDTLMISRTPEVTCVVVDVSHEDPEVKFNWYVDGVEVHNAKTKPREEQYNSTYRVVSVLTVLHQDWLNGKEYKCKVSNKALPAPIEKTISKAKGQPREPQVYTLPPSREEMTKNQVSLTCLVKGFYPSDIAVEWESNGQPENNYKTTPPVLDSDGSFFLYSKLTVDKSRWQQGNVFSCSVMHEALHNHYTQKSLSLSPGGGGGSGGGGSGGGGSQVQLVQSGGGLVQPGGSLRLSCAASGFTFDDYAMHWVRQAPGKGLEWVAGISWNSGSIGYADSVKGRFTISRDNAKNSLYLQMNSLRPEDTAVYYCARDLGYNQWVEGFDYWGQGTLVTVSSASTGGGGSGGGGSGGGGSGGGGSSYELTQDPAVSVALGQTVRITCQGDSLRSYYASWYQQKPGQAPVLVIYGKNNRPSGIPDRFSGSTSGNSASLTITGAQAEDEADYYCNSRDSSGNHWVFGGGTKVTVLG

SEQ ID NO: 34 - DNA, 2166 bp, Artificial Sequence
  Description of Artificial Sequence: Synthetic polynucleotide
  M78 -G1-C8
gaagtacagcttttgcaaagcgggggtggcttggtccagcccggagggtccttgaggctctcgtgtgcggcctcagggttcgacttttcgtcgtatcccatgcactgggtccgccaggcccctggtaaagggctggagtgggtaggatccattagctcctcgggaggggcaactccgtatgcggattcagtgaaaggccgattcacaatctcgcgggataactcgaagaacaccctgtaccttcaaatgaattcactcagaccagaggacacggcagtctactattgcgctaaggacttttacactatcttgacgggaaatgcgtttgatatgtggggacagggaacctcagtgacggtcagctcagctagcacgaaggggcctagcgtctttccgctcgccccctcgtcaaaatcaacgtcgggtggaacggccgcattgggttgtctcgtaaaggactactttccggaacccgtcaccgtatcgtggaattcaggcgccctgacttccggggtccacacctttcccgctgtcttgcagtcctcgggtttgtattcactgtcgtcagtggtgacagtaccatcatcctcactgggaactcaaacgtacatctgcaacgtgaaccacaagccgagcaacactaaggtggataagaaggtagagcccaagtcatgcgacaaaacgcatacatgcccgccatgccccgcaccagaacttttgggaggtccgtcagtgtttctctttccgcctaagcccaaagacacactgatgatttcccggacgcccgaagtcacttgtgtggtcgtcgacgtgtcccatgaagatcccgaagtaaagttcaactggtatgtcgacggtgtggaagtccacaatgcaaaaaccaagcccagggaagaacagtacaacagcacatatcgagtggtgagcgtgttgaccgtgctgcaccaagactggctcaatggaaaggagtacaaatgcaaagtgtccaacaaggcactgcctgcgcccattgagaaaacgatttcgaaagcaaagggacagccaagagaaccccaagtgtatacccttcccccgtcgcgcgaggaaatgacgaagaaccaggtatcgttgacgtgtcttgtaaagggattctatccctcggacatcgcggtcgagtgggagtccaacggacagccagagaataactacaaaaccacaccgcctgtgctggattccgacgggtcgtttttcttgtattcgaagcttacggtagacaaaagccggtggcagcagggtaatgtgttcagctgctcagtaatgcacgaggctctccataatcattacactcagaagtccctttccctttcgccgggagggggtgggggatccggcggaggtgggtcgggaggtggaggatcacaagtgcaattggtacagtcgggaggcgggcttgtgcaacccggagggtcactgcgcctttcatgtgcggcgagcggtttcacgttcgatgattatgcgatgcattgggtacggcaggcacctggcaaagggttggagtgggtagccggaatctcgtggaatagcgggagcatcggttatgcggattccgtcaaagggaggtttacaatttcgagggacaatgcgaagaacagcctgtatctccaaatgaattcgctcaggcccgaagataccgccgtctactactgcgcgagggacttgggatacaaccagtgggtggaagggtttgattactgggggcaggggactctggtaactgtctcatcggcatcgactggtggtggcgggtccggagggggaggaagcggaggaggcgggagcggaggcggtgggtccagctacgaactgactcaagatccggccgtatcggtggccctcggacaaacagtgcgaatcacctgtcagggggatagccttagatcgtactacgcttcgtggtatcagcaaaagcccggacaggcaccagtgcttgtgatctacggaaagaacaatagaccgagcggaattccggatcggttttcgggttcgacttccggaaattcggcgtcgctcacgatcaccggagctcaggcagaggatgaagcggattactattgtaattcccgcgattcgtcggggaatcattgggtgttcggtgggggtacaaaggtaactgtactcggctgataa

SEQ ID NO: 35 - protein, 715 aa, Artificial Sequence
  Description of Artificial Sequence: Synthetic polypeptide
  M78-G1-P1
EVQLLQSGGGLVQPGGSLRLSCAASGFDFSSYPMHWVRQAPGKGLEWVGSISSSGGATPYADSVKGRFTISRDNSKNTLYLQMNSLRPEDTAVYYCAKDFYTILTGNAFDMWGQGTSVTVSSASTKGPSVFPLAPSSKSTSGGTAALGCLVKDYFPEPVTVSWNSGALTSGVHTFPAVLQSSGLYSLSSVVTVPSSSLGTQTYICNVNHKPSNTKVDKKVEPKSCDKTHTCPPCPAPELLGGPSVFLFPPKPKDTLMISRTPEVTCVVVDVSHEDPEVKFNWYVDGVEVHNAKTKPREEQYNSTYRVVSVLTVLHQDWLNGKEYKCKVSNKALPAPIEKTISKAKGQPREPQVYTLPPSREEMTKNQVSLTCLVKGFYPSDIAVEWESNGQPENNYKTTPPVLDSDGSFFLYSKLTVDKSRWQQGNVFSCSVMHEALHNHYTQKSLSLSPGGGGGSGGGGSGGGGSEVQLVESGGGLVQPGRSLRLSCAASGFTFDDYAMHWVRQAPGKGLEWVSGISWDSGSTGYADSVKGRFTISRDNAKNSLYLQMNSLRAEDTALYYCARDLGAYQWVEGFDYWGQGTLVTVSSASTGGGGSGGGGSGGGGSSSELTQDPAVSVALGQTVRITCQGDSLRSYYASWYQQKPGQAPVLVIYGKNNRPSGIPDRFSGSSSGNTASLTITGAQAEDEADYYCESRDSPGNQWVFGGGTKVTVLG

SEQ ID NO: 36 - DNA, 2154 bp, Artificial Sequence
  Description of Artificial Sequence: Synthetic polynucleotide
  M78-G1-P1
gaagtacagcttttgcaaagcgggggtggcttggtccagcccggagggtccttgaggctctcgtgtgcggcctcagggttcgacttttcgtcgtatcccatgcactgggtccgccaggcccctggtaaagggctggagtgggtaggatccattagctcctcgggaggggcaactccgtatgcggattcagtgaaaggccgattcacaatctcgcgggataactcgaagaacaccctgtaccttcaaatgaattcactcagaccagaggacacggcagtctactattgcgctaaggacttttacactatcttgacgggaaatgcgtttgatatgtggggacagggaacctcagtgacggtcagctcagctagcactaagggaccgtccgtgtttcccctcgcgcctagctcgaagagcacatcgggaggaacagcggcgctcggctgtctcgtcaaagactacttccccgagccggtgaccgtgagctggaattccggagcgttgacctcaggggtgcatacattccctgccgtactgcaatcatcagggctctactcattgtcgagcgtagtgactgtaccgtcgtcatcgctcggaacgcagacgtacatctgcaatgtcaatcacaagccctccaatactaaggtagataagaaagtagaaccgaagtcgtgtgataagacccatacatgccctccgtgccccgcaccggaactcttgggtggcccatcagtctttctgttcccgccaaagcccaaagacacactgatgatttcgcgcacgcccgaagtcacttgcgtcgtggtggatgtgtcgcatgaggacccggaggtcaagttcaactggtacgtcgatggtgtagaagtccacaacgccaagaccaagcctcgggaggagcagtataactccacctaccgggtagtgagcgtgcttacagtgctccatcaggactggctgaacggcaaagaatacaaatgcaaagtcagcaacaaagcgctgccagcgcccatcgagaaaacaattagcaaagcgaaagggcagcccagagaacctcaagtgtatacattgccgccgtcgcgggaggaaatgacaaagaatcaggtatccctgacgtgtcttgtgaaaggcttttacccatccgacattgcggtagagtgggagtcgaatgggcaacccgagaacaactataagacgactcccccagtcttggattcagacggatcctttttcttgtactcgaaactcacagtcgacaagtccagatggcagcaggggaacgtgttcagctgcagcgtgatgcacgaggcccttcacaaccactatacgcagaaatcattaagcttatcgccaggtaaaggaggtggcgggagcgggggagggggatccggtggcggagggtcggaagtgcagctggtggagagcggaggtgggcttgtccaaccgggcaggtcacttagattgtcatgtgcggcgagcggttttacctttgacgattatgcgatgcactgggtccgccaggcaccggggaaggggctcgaatgggtatcaggaatctcgtgggactcggggtccacgggctatgcggactcggtcaaggggcgcttcacaatctcaagggacaatgccaaaaactcgctctatcttcagatgaactcattgcgagctgaggacacggcgctttactactgtgcgcgggatttgggtgcctatcaatgggtagaagggtttgattactgggggcagggaactctcgtgaccgtgtccagcgcatcgacgggaggaggaggttccgggggtgggggaagcgggggtggagggtcatcgtcagagctgacgcaagatcccgcggtatccgtcgcccttgggcagaccgtcaggattacgtgccagggagactcacttagaagctactacgcttcctggtatcagcaaaagccgggacaggcacccgtgttggtgatctacgggaagaataaccggcccagcgggattcctgaccgcttttcgggctcctcatcggggaacacagcctcgttgactatcacgggtgcgcaagccgaggacgaggcagactattactgtgaatcgcgagattcccctggtaatcagtgggtctttgggggaggaactaaggtaacggtattggggtgataa

SEQ ID NO: 37 - protein, 720 aa, Artificial Sequence
  Description of Artificial Sequence: Synthetic polypeptide
  M78-G1-M1.3
EVQLLQSGGGLVQPGGSLRLSCAASGFDFSSYPMHWVRQAPGKGLEWVGSISSSGGATPYADSVKGRFTISRDNSKNTLYLQMNSLRPEDTAVYYCAKDFYTILTGNAFDMWGQGTSVTVSSASTKGPSVFPLAPSSKSTSGGTAALGCLVKDYFPEPVTVSWNSGALTSGVHTFPAVLQSSGLYSLSSVVTVPSSSLGTQTYICNVNHKPSNTKVDKKVEPKSCDKTHTCPPCPAPELLGGPSVFLFPPKPKDTLMISRTPEVTCVVVDVSHEDPEVKFNWYVDGVEVHNAKTKPREEQYNSTYRVVSVLTVLHQDWLNGKEYKCKVSNKALPAPIEKTISKAKGQPREPQVYTLPPSREEMTKNQVSLTCLVKGFYPSDIAVEWESNGQPENNYKTTPPVLDSDGSFFLYSKLTVDKSRWQQGNVFSCSVMHEALHNHYTQKSLSLSPGGGGGSGGGGSGGGGSQVQLVQSGGGLVQPGGSLRLSCAASGFTFDDYAMHWVRQAPGKGLEWVAGISWDSGSTGYADSVKGRFTISRDNAKNSLYLQMNSLRAEDTALYYCARDLGAYQWVEGFDYWGQGTLVTVSSASTGGGGSGGGGSGGGGSGGGGSSYELTQDPAVSVALGQTVRITCQGDSLRSYYASWYQQKPGQAPVLVIYGKNNRPSGIPDRFSGSTSGNSASLTITGAQAEDEADYYCNSRDSPGNQWVFGGGTKVTVLG

SEQ ID NO: 38 - DNA, 2169 bp, Artificial Sequence
  Description of Artificial Sequence: Synthetic polynucleotide
  M78-G1-M1.3
gaagtacagcttttgcaaagcgggggtggcttggtccagcccggagggtccttgaggctctcgtgtgcggcctcagggttcgacttttcgtcgtatcccatgcactgggtccgccaggcccctggtaaagggctggagtgggtaggatccattagctcctcgggaggggcaactccgtatgcggattcagtgaaaggccgattcacaatctcgcgggataactcgaagaacaccctgtaccttcaaatgaattcactcagaccagaggacacggcagtctactattgcgctaaggacttttacactatcttgacgggaaatgcgtttgatatgtggggacagggaacctcagtgacggtcagctcagctagcactaagggaccgtccgtgtttcccctcgcgcctagctcgaagagcacatcgggaggaacagcggcgctcggctgtctcgtcaaagactacttccccgagccggtgaccgtgagctggaattccggagcgttgacctcaggggtgcatacattccctgccgtactgcaatcatcagggctctactcattgtcgagcgtagtgactgtaccgtcgtcatcgctcggaacgcagacgtacatctgcaatgtcaatcacaagccctccaatactaaggtagataagaaagtagaaccgaagtcgtgtgataagacccatacatgccctccgtgccccgcaccggaactcttgggtggcccatcagtctttctgttcccgccaaagcccaaagacacactgatgatttcgcgcacgcccgaagtcacttgcgtcgtggtggatgtgtcgcatgaggacccggaggtcaagttcaactggtacgtcgatggtgtagaagtccacaacgccaagaccaagcctcgggaggagcagtataactccacctaccgggtagtgagcgtgcttacagtgctccatcaggactggctgaacggcaaagaatacaaatgcaaagtcagcaacaaagcgctgccagcgcccatcgagaaaacaattagcaaagcgaaagggcagcccagagaacctcaagtgtatacattgccgccgtcgcgggaggaaatgacaaagaatcaggtatccctgacgtgtcttgtgaaaggcttttacccatccgacattgcggtagagtgggagtcgaatgggcaacccgagaacaactataagacgactcccccagtcttggattcagacggatcctttttcttgtactcgaaactcacagtcgacaagtccagatggcagcaggggaacgtgttcagctgcagcgtgatgcacgaggcccttcacaaccactatacgcagaaatcattaagcttatcgccaggtaaaggaggtggcgggagcgggggagggggatccggtggcggagggtcgcaagtgcagctggtgcaaagcggaggtgggcttgtccaacccggaggctcacttagattgtcatgtgcggcgagcggttttacctttgacgattatgcgatgcactgggtccgccaggcaccggggaaggggctcgaatgggtagccggaatctcgtgggactcggggtccacgggctatgcggactcggtcaaggggcgcttcacaatctcaagggacaatgccaaaaactcgctctatctgcagatgaactcattgcgagctgaggacacggcgctttactactgtgcgcgggatttgggtgcctatcaatgggtagaagggtttgattactgggggcagggaactctcgtgaccgtgtccagcgcatcgacgggaggaggaggttccgggggtgggggaagcgggggtggagggtcaggaggtgggggatcgtcatacgagctgacgcaagatcccgcggtatccgtcgcccttgggcagaccgtcaggattacgtgccagggagactcacttagaagctactacgcttcctggtatcagcaaaagccgggacaggcacccgtgttggtgatctacgggaagaataaccggcccagcgggattcctgaccgcttttcgggctccacctcagggaactcggcctcgttgactatcacgggtgcgcaagccgaggacgaggcagactattactgtaactcgcgagattcccctggtaatcagtgggtctttgggggaggaactaaggtaacggtattggggtgataa

SEQ ID NO: 39 - protein, 715 aa, Artificial Sequence
  Description of Artificial Sequence: Synthetic polypeptide
  M78-G1-M27
EVQLLQSGGGLVQPGGSLRLSCAASGFDFSSYPMHWVRQAPGKGLEWVGSISSSGGATPYADSVKGRFTISRDNSKNTLYLQMNSLRPEDTAVYYCAKDFYTILTGNAFDMWGQGTSVTVSSASTKGPSVFPLAPSSKSTSGGTAALGCLVKDYFPEPVTVSWNSGALTSGVHTFPAVLQSSGLYSLSSVVTVPSSSLGTQTYICNVNHKPSNTKVDKKVEPKSCDKTHTCPPCPAPELLGGPSVFLFPPKPKDTLMISRTPEVTCVVVDVSHEDPEVKFNWYVDGVEVHNAKTKPREEQYNSTYRVVSVLTVLHQDWLNGKEYKCKVSNKALPAPIEKTISKAKGQPREPQVYTLPPSREEMTKNQVSLTCLVKGFYPSDIAVEWESNGQPENNYKTTPPVLDSDGSFFLYSKLTVDKSRWQQGNVFSCSVMHEALHNHYTQKSLSLSPGGGGGSGGGGSGGGGSEVQLVESGGGLVQPGRSLRLSCAASGFTFDDYAMHWVRQAPGKGLEWVSGISWNSGSTGYADSVKGRFTISRDNAKNSLYLQMNSLRAEDTALYYCARDLGFNQWVDGFDYWGQGTLVTVSSASTGGGGSGGGGSGGGGSSSELTQDPAVSVALGQTVRITCQGDSLRSYYASWYQQKPGQAPVLVIYGKNNRPSGIPDRFSGSSSGNTASLTITGAQAEDEADYYCNSRDTPGDQWVFGGGTKVTVLG

SEQ ID NO: 40 - DNA, 2154 bp, Artificial Sequence
  Description of Artificial Sequence: Synthetic polynucleotide
  M78-G1-M27
gaagtacagcttttgcaaagcgggggtggcttggtccagcccggagggtccttgaggctctcgtgtgcggcctcagggttcgacttttcgtcgtatcccatgcactgggtccgccaggcccctggtaaagggctggagtgggtaggatccattagctcctcgggaggggcaactccgtatgcggattcagtgaaaggccgattcacaatctcgcgggataactcgaagaacaccctgtaccttcaaatgaattcactcagaccagaggacacggcagtctactattgcgctaaggacttttacactatcttgacgggaaatgcgtttgatatgtggggacagggaacctcagtgacggtcagctcagctagcactaagggaccgtccgtgtttcccctcgcgcctagctcgaagagcacatcgggaggaacagcggcgctcggctgtctcgtcaaagactacttccccgagccggtgaccgtgagctggaattccggagcgttgacctcaggggtgcatacattccctgccgtactgcaatcatcagggctctactcattgtcgagcgtagtgactgtaccgtcgtcatcgctcggaacgcagacgtacatctgcaatgtcaatcacaagccctccaatactaaggtagataagaaagtagaaccgaagtcgtgtgataagacccatacatgccctccgtgccccgcaccggaactcttgggtggcccatcagtctttctgttcccgccaaagcccaaagacacactgatgatttcgcgcacgcccgaagtcacttgcgtcgtggtggatgtgtcgcatgaggacccggaggtcaagttcaactggtacgtcgatggtgtagaagtccacaacgccaagaccaagcctcgggaggagcagtataactccacctaccgggtagtgagcgtgcttacagtgctccatcaggactggctgaacggcaaagaatacaaatgcaaagtcagcaacaaagcgctgccagcgcccatcgagaaaacaattagcaaagcgaaagggcagcccagagaacctcaagtgtatacattgccgccgtcgcgggaggaaatgacaaagaatcaggtatccctgacgtgtcttgtgaaaggcttttacccatccgacattgcggtagagtgggagtcgaatgggcaacccgagaacaactataagacgactcccccagtcttggattcagacggatcctttttcttgtactcgaaactcacagtcgacaagtccagatggcagcaggggaacgtgttcagctgcagcgtgatgcacgaggcccttcacaaccactatacgcagaaatcattaagcttatcgccaggtaaaggaggtggcgggagcgggggagggggatccggtggcggagggtcggaagtgcagctggtggagagcggaggtgggcttgtccaaccgggcaggtcacttagattgtcatgtgcggcgagcggttttacctttgacgattatgcgatgcactgggtccgccaggcaccggggaaggggctcgaatgggtatcaggaatctcgtggaattcggggtccacgggctatgcggactcggtcaaggggcgcttcacaatctcaagggacaatgccaaaaactcgctctatttgcaaatgaactcattgcgagctgaggacacggcgctttactactgtgcgcgggatttgggctttaaccaatgggtagacgggtttgattactgggggcagggaactctcgtgaccgtgtccagcgcatcgacgggaggaggaggttccgggggtgggggaagcgggggtggagggtcatcgtcagagctgacgcaagatcccgcggtatccgtcgcccttgggcagaccgtcaggattacgtgccagggagactcacttagaagctactacgcttcctggtatcagcaaaagccgggacaggcacccgtgttggtgatctacgggaagaataaccggcccagcgggattcctgaccgcttttcgggctcctcatcggggaacacagcctcgttgactatcacgggtgcgcaagccgaggacgaggcagactattactgtaactcgcgagatacgcctggtgaccagtgggtctttgggggaggaactaaggtaacggtattggggtgataa

SEQ ID NO: 41 - protein, 715 aa, Artificial Sequence
  Description of Artificial Sequence: Synthetic polypeptide
  M78-G1-P6
EVQLLQSGGGLVQPGGSLRLSCAASGFDFSSYPMHWVRQAPGKGLEWVGSISSSGGATPYADSVKGRFTISRDNSKNTLYLQMNSLRPEDTAVYYCAKDFYTILTGNAFDMWGQGTSVTVSSASTKGPSVFPLAPSSKSTSGGTAALGCLVKDYFPEPVTVSWNSGALTSGVHTFPAVLQSSGLYSLSSVVTVPSSSLGTQTYICNVNHKPSNTKVDKKVEPKSCDKTHTCPPCPAPELLGGPSVFLFPPKPKDTLMISRTPEVTCVVVDVSHEDPEVKFNWYVDGVEVHNAKTKPREEQYNSTYRVVSVLTVLHQDWLNGKEYKCKVSNKALPAPIEKTISKAKGQPREPQVYTLPPSREEMTKNQVSLTCLVKGFYPSDIAVEWESNGQPENNYKTTPPVLDSDGSFFLYSKLTVDKSRWQQGNVFSCSVMHEALHNHYTQKSLSLSPGGGGGSGGGGSGGGGSEVQLVESGGGLVQPGRSLRLSCAASGFTFDDYAMHWVRQAPGKGLEWVSGISWNSGSTGYADSVKGRFTISRDNAKNSLYLQMNSLRAEDTALYYCARDLGYNQWLEGFDYWGQGTLVTVSSASTGGGGSGGGGSGGGGSSSELTQDPAVSVALGQTVRITCQGDSLRSYYASWYQQKPGQAPVLVIYGKNNRPSGIPDRFSGSSSGNTASLTITGAQAEDEADYYCMSRDHPGNQWVFGGGTKVTVLG

SEQ ID NO: 42 - DNA, 2154 bp, Artificial Sequence
  Description of Artificial Sequence: Synthetic polynucleotide
  M78-G1-P6
gaagtacagcttttgcaaagcgggggtggcttggtccagcccggagggtccttgaggctctcgtgtgcggcctcagggttcgacttttcgtcgtatcccatgcactgggtccgccaggcccctggtaaagggctggagtgggtaggatccattagctcctcgggaggggcaactccgtatgcggattcagtgaaaggccgattcacaatctcgcgggataactcgaagaacaccctgtaccttcaaatgaattcactcagaccagaggacacggcagtctactattgcgctaaggacttttacactatcttgacgggaaatgcgtttgatatgtggggacagggaacctcagtgacggtcagctcagctagcactaagggaccgtccgtgtttcccctcgcgcctagctcgaagagcacatcgggaggaacagcggcgctcggctgtctcgtcaaagactacttccccgagccggtgaccgtgagctggaattccggagcgttgacctcaggggtgcatacattccctgccgtactgcaatcatcagggctctactcattgtcgagcgtagtgactgtaccgtcgtcatcgctcggaacgcagacgtacatctgcaatgtcaatcacaagccctccaatactaaggtagataagaaagtagaaccgaagtcgtgtgataagacccatacatgccctccgtgccccgcaccggaactcttgggtggcccatcagtctttctgttcccgccaaagcccaaagacacactgatgatttcgcgcacgcccgaagtcacttgcgtcgtggtggatgtgtcgcatgaggacccggaggtcaagttcaactggtacgtcgatggtgtagaagtccacaacgccaagaccaagcctcgggaggagcagtataactccacctaccgggtagtgagcgtgcttacagtgctccatcaggactggctgaacggcaaagaatacaaatgcaaagtcagcaacaaagcgctgccagcgcccatcgagaaaacaattagcaaagcgaaagggcagcccagagaacctcaagtgtatacattgccgccgtcgcgggaggaaatgacaaagaatcaggtatccctgacgtgtcttgtgaaaggcttttacccatccgacattgcggtagagtgggagtcgaatgggcaacccgagaacaactataagacgactcccccagtcttggattcagacggatcctttttcttgtactcgaaactcacagtcgacaagtccagatggcagcaggggaacgtgttcagctgcagcgtgatgcacgaggcccttcacaaccactatacgcagaaatcattaagcttatcgccaggtaaaggaggtggcgggagcgggggagggggatccggtggcggagggtcggaagtgcagctggtggagagcggaggtgggcttgtccaaccgggcaggtcacttagattgtcatgtgcggcgagcggttttacctttgacgattatgcgatgcactgggtccgccaggcaccggggaaggggctcgaatgggtatcaggaatctcgtggaactcggggtccacgggctatgcggactcggtcaaggggcgcttcacaatctcaagggacaatgccaaaaactcgctctatctccagatgaactcattgcgagctgaggacacggcgctttactactgtgcgcgggatttgggttacaaccaatggcttgaagggtttgattactgggggcagggaactctcgtgaccgtgtccagcgcatcgacgggaggaggaggttccgggggtgggggaagcgggggtggagggtcatcgtcagagctgacgcaagatcccgcggtatccgtcgcccttgggcagaccgtcaggattacgtgccagggagactcacttagaagctactacgcttcctggtatcagcaaaagccgggacaggcacccgtgttggtgatctacgggaagaataaccggcccagcgggattcctgaccgcttttcgggctcctcatcggggaacacagcctcgttgactatcacgggtgcgcaagccgaggacgaggcagactattactgtatgtcgcgagatcaccctggtaatcagtgggtctttgggggaggaactaaggtaacggtattggggtgataa

SEQ ID NO: 43 - protein, 715 aa, Artificial Sequence
  Description of Artificial Sequence: Synthetic polypeptide
  M78-G1-B69
EVQLLQSGGGLVQPGGSLRLSCAASGFDFSSYPMHWVRQAPGKGLEWVGSISSSGGATPYADSVKGRFTISRDNSKNTLYLQMNSLRPEDTAVYYCAKDFYTILTGNAFDMWGQGTSVTVSSASTKGPSVFPLAPSSKSTSGGTAALGCLVKDYFPEPVTVSWNSGALTSGVHTFPAVLQSSGLYSLSSVVTVPSSSLGTQTYICNVNHKPSNTKVDKKVEPKSCDKTHTCPPCPAPELLGGPSVFLFPPKPKDTLMISRTPEVTCVVVDVSHEDPEVKFNWYVDGVEVHNAKTKPREEQYNSTYRVVSVLTVLHQDWLNGKEYKCKVSNKALPAPIEKTISKAKGQPREPQVYTLPPSREEMTKNQVSLTCLVKGFYPSDIAVEWESNGQPENNYKTTPPVLDSDGSFFLYSKLTVDKSRWQQGNVFSCSVMHEALHNHYTQKSLSLSPGGGGGSGGGGSGGGGSEVQLVESGGGLVQPGRSLRLSCAASGFTFDDYAMHWVRQAPGKGLEWVSGISWNSGSVGYADSVKGRFTISRDNAKNSLYLQMNSLRAEDTALYYCARDLGYNQWLEGFDYWGQGTLVTVSSASTGGGGSGGGGSGGGGSSSELTQDPAVSVALGQTVRITCQGDSLRSYYASWYQQKPGQAPVLVIYGKNNRPSGIPDRFSGSSSGNTASLTITGAQAEDEADYYCMSRDSPGNQWVFGGGTKVTVLG

SEQ ID NO: 44 - DNA, 2154 bp, Artificial Sequence
  Description of Artificial Sequence: Synthetic polynucleotide
  M78-G1-B69
gaagtacagcttttgcaaagcgggggtggcttggtccagcccggagggtccttgaggctctcgtgtgcggcctcagggttcgacttttcgtcgtatcccatgcactgggtccgccaggcccctggtaaagggctggagtgggtaggatccattagctcctcgggaggggcaactccgtatgcggattcagtgaaaggccgattcacaatctcgcgggataactcgaagaacaccctgtaccttcaaatgaattcactcagaccagaggacacggcagtctactattgcgctaaggacttttacactatcttgacgggaaatgcgtttgatatgtggggacagggaacctcagtgacggtcagctcagctagcactaagggaccgtccgtgtttcccctcgcgcctagctcgaagagcacatcgggaggaacagcggcgctcggctgtctcgtcaaagactacttccccgagccggtgaccgtgagctggaattccggagcgttgacctcaggggtgcatacattccctgccgtactgcaatcatcagggctctactcattgtcgagcgtagtgactgtaccgtcgtcatcgctcggaacgcagacgtacatctgcaatgtcaatcacaagccctccaatactaaggtagataagaaagtagaaccgaagtcgtgtgataagacccatacatgccctccgtgccccgcaccggaactcttgggtggcccatcagtctttctgttcccgccaaagcccaaagacacactgatgatttcgcgcacgcccgaagtcacttgcgtcgtggtggatgtgtcgcatgaggacccggaggtcaagttcaactggtacgtcgatggtgtagaagtccacaacgccaagaccaagcctcgggaggagcagtataactccacctaccgggtagtgagcgtgcttacagtgctccatcaggactggctgaacggcaaagaatacaaatgcaaagtcagcaacaaagcgctgccagcgcccatcgagaaaacaattagcaaagcgaaagggcagcccagagaacctcaagtgtatacattgccgccgtcgcgggaggaaatgacaaagaatcaggtatccctgacgtgtcttgtgaaaggcttttacccatccgacattgcggtagagtgggagtcgaatgggcaacccgagaacaactataagacgactcccccagtcttggattcagacggatcctttttcttgtactcgaaactcacagtcgacaagtccagatggcagcaggggaacgtgttcagctgcagcgtgatgcacgaggcccttcacaaccactatacgcagaaatcattaagcttatcgccaggtaaaggaggtggcgggagcgggggagggggatccggtggcggagggtcggaagtgcagctggtggagagcggaggtgggcttgtccaaccgggcaggtcacttagattgtcatgtgcggcgagcggttttacctttgacgattatgcgatgcactgggtccgccaggcaccggggaaggggctcgaatgggtatcaggaatctcgtggaactcggggtccgtgggctatgcggactcggtcaaggggcgcttcacaatctcaagggacaatgccaaaaactcgctctacttgcagatgaactcattgcgagctgaggacacggcgctttactactgtgcgcgggatttgggctacaatcaatggttggaagggtttgattactgggggcagggaactctcgtgaccgtgtccagcgcatcgacgggaggaggaggttccgggggtgggggaagcgggggtggagggtcatcgtcagagctgacgcaagatcccgcggtatccgtcgcccttgggcagaccgtcaggattacgtgccagggagactcacttagaagctactacgcttcctggtatcagcaaaagccgggacaggcacccgtgttggtgatctacgggaagaataaccggcccagcgggattcctgaccgcttttcgggctcctcatcggggaacacagcctcgttgactatcacgggtgcgcaagccgaggacgaggcagactattactgtatgtcgcgagattcccctggtaatcagtgggtctttgggggaggaactaaggtaacggtattggggtgataa

SEQ ID NO: 45 - protein, 720 aa, Artificial Sequence
  Description of Artificial Sequence: Synthetic polypeptide
  M57 -G1-C8
EVQLLQSGGGLVQPGGSLRLSCAASGFFFSKYPMHWVRQAPGKGLEWVSSISSDGGATVYADSVKGRFTISRDNSKNTLYLQMNSLRAEDTAVYYCAKDFYTWLTGNAFDSWGQGTSVTVSSASTKGPSVFPLAPSSKSTSGGTAALGCLVKDYFPEPVTVSWNSGALTSGVHTFPAVLQSSGLYSLSSVVTVPSSSLGTQTYICNVNHKPSNTKVDKKVEPKSCDKTHTCPPCPAPELLGGPSVFLFPPKPKDTLMISRTPEVTCVVVDVSHEDPEVKFNWYVDGVEVHNAKTKPREEQYNSTYRVVSVLTVLHQDWLNGKEYKCKVSNKALPAPIEKTISKAKGQPREPQVYTLPPSREEMTKNQVSLTCLVKGFYPSDIAVEWESNGQPENNYKTTPPVLDSDGSFFLYSKLTVDKSRWQQGNVFSCSVMHEALHNHYTQKSLSLSPGGGGGSGGGGSGGGGSQVQLVQSGGGLVQPGGSLRLSCAASGFTFDDYAMHWVRQAPGKGLEWVAGISWNSGSIGYADSVKGRFTISRDNAKNSLYLQMNSLRPEDTAVYYCARDLGYNQWVEGFDYWGQGTLVTVSSASTGGGGSGGGGSGGGGSGGGGSSYELTQDPAVSVALGQTVRITCQGDSLRSYYASWYQQKPGQAPVLVIYGKNNRPSGIPDRFSGSTSGNSASLTITGAQAEDEADYYCNSRDSSGNHWVFGGGTKVTVLG

SEQ ID NO: 46 - DNA, 2166 bp, Artificial Sequence
  Description of Artificial Sequence: Synthetic polynucleotide
  M57 -G1-C8
gaggtgcagttgctccaatccggaggtggacttgtacagccgggtgggtcgctgaggttgtcatgtgcggcgagcggattcttcttctcgaagtaccctatgcactgggtgagacaggctcccggcaaaggattggaatgggtatcatcgatttcgagcgatggcggagccacggtctatgcagactccgtcaaaggccggtttactatctcacgcgataacagcaagaatacactgtatctccagatgaactcgctgagggcggaggacacagccgtgtactactgcgccaaagacttctacacgtggctcaccgggaatgcgtttgatagctggggacaagggacttcggtcacggtgtcctcggctagcacgaaggggcctagcgtctttccgctcgccccctcgtcaaaatcaacgtcgggtggaacggccgcattgggttgtctcgtaaaggactactttccggaacccgtcaccgtatcgtggaattcaggcgccctgacttccggggtccacacctttcccgctgtcttgcagtcctcgggtttgtattcactgtcgtcagtggtgacagtaccatcatcctcactgggaactcaaacgtacatctgcaacgtgaaccacaagccgagcaacactaaggtggataagaaggtagagcccaagtcatgcgacaaaacgcatacatgcccgccatgccccgcaccagaacttttgggaggtccgtcagtgtttctctttccgcctaagcccaaagacacactgatgatttcccggacgcccgaagtcacttgtgtggtcgtcgacgtgtcccatgaagatcccgaagtaaagttcaactggtatgtcgacggtgtggaagtccacaatgcaaaaaccaagcccagggaagaacagtacaacagcacatatcgagtggtgagcgtgttgaccgtgctgcaccaagactggctcaatggaaaggagtacaaatgcaaagtgtccaacaaggcactgcctgcgcccattgagaaaacgatttcgaaagcaaagggacagccaagagaaccccaagtgtatacccttcccccgtcgcgcgaggaaatgacgaagaaccaggtatcgttgacgtgtcttgtaaagggattctatccctcggacatcgcggtcgagtgggagtccaacggacagccagagaataactacaaaaccacaccgcctgtgctggattccgacgggtcgtttttcttgtattcgaagcttacggtagacaaaagccggtggcagcagggtaatgtgttcagctgctcagtaatgcacgaggctctccataatcattacactcagaagtccctttccctttcgccgggagggggtgggggatccggcggaggtgggtcgggaggtggaggatcacaagtgcaattggtacagtcgggaggcgggcttgtgcaacccggagggtcactgcgcctttcatgtgcggcgagcggtttcacgttcgatgattatgcgatgcattgggtacggcaggcacctggcaaagggttggagtgggtagccggaatctcgtggaatagcgggagcatcggttatgcggattccgtcaaagggaggtttacaatttcgagggacaatgcgaagaacagcctgtatctccaaatgaattcgctcaggcccgaagataccgccgtctactactgcgcgagggacttgggatacaaccagtgggtggaagggtttgattactgggggcaggggactctggtaactgtctcatcggcatcgactggtggtggcgggtccggagggggaggaagcggaggaggcgggagcggaggcggtgggtccagctacgaactgactcaagatccggccgtatcggtggccctcggacaaacagtgcgaatcacctgtcagggggatagccttagatcgtactacgcttcgtggtatcagcaaaagcccggacaggcaccagtgcttgtgatctacggaaagaacaatagaccgagcggaattccggatcggttttcgggttcgacttccggaaattcggcgtcgctcacgatcaccggagctcaggcagaggatgaagcggattactattgtaattcccgcgattcgtcggggaatcattgggtgttcggtgggggtacaaaggtaactgtactcggctgataa

SEQ ID NO: 47 - protein, 715 aa, Artificial Sequence
  Description of Artificial Sequence: Synthetic polypeptide
  M57-G1-P1
EVQLLQSGGGLVQPGGSLRLSCAASGFFFSKYPMHWVRQAPGKGLEWVSSISSDGGATVYADSVKGRFTISRDNSKNTLYLQMNSLRAEDTAVYYCAKDFYTWLTGNAFDSWGQGTSVTVSSASTKGPSVFPLAPSSKSTSGGTAALGCLVKDYFPEPVTVSWNSGALTSGVHTFPAVLQSSGLYSLSSVVTVPSSSLGTQTYICNVNHKPSNTKVDKKVEPKSCDKTHTCPPCPAPELLGGPSVFLFPPKPKDTLMISRTPEVTCVVVDVSHEDPEVKFNWYVDGVEVHNAKTKPREEQYNSTYRVVSVLTVLHQDWLNGKEYKCKVSNKALPAPIEKTISKAKGQPREPQVYTLPPSREEMTKNQVSLTCLVKGFYPSDIAVEWESNGQPENNYKTTPPVLDSDGSFFLYSKLTVDKSRWQQGNVFSCSVMHEALHNHYTQKSLSLSPGGGGGSGGGGSGGGGSEVQLVESGGGLVQPGRSLRLSCAASGFTFDDYAMHWVRQAPGKGLEWVSGISWDSGSTGYADSVKGRFTISRDNAKNSLYLQMNSLRAEDTALYYCARDLGAYQWVEGFDYWGQGTLVTVSSASTGGGGSGGGGSGGGGSSSELTQDPAVSVALGQTVRITCQGDSLRSYYASWYQQKPGQAPVLVIYGKNNRPSGIPDRFSGSSSGNTASLTITGAQAEDEADYYCESRDSPGNQWVFGGGTKVTVLG

SEQ ID NO: 48 - DNA, 2154 bp, Artificial Sequence
  Description of Artificial Sequence: Synthetic polynucleotide
  M57-G1-P1
gaggtgcagttgctccaatccggaggtggacttgtacagccgggtgggtcgctgaggttgtcatgtgcggcgagcggattcttcttctcgaagtaccctatgcactgggtgagacaggctcccggcaaaggattggaatgggtatcatcgatttcgagcgatggcggagccacggtctatgcagactccgtcaaaggccggtttactatctcacgcgataacagcaagaatacactgtatctccagatgaactcgctgagggcggaggacacagccgtgtactactgcgccaaagacttctacacgtggctcaccgggaatgcgtttgatagctggggacaagggacttcggtcacggtgtcctcggctagcactaagggaccgtccgtgtttcccctcgcgcctagctcgaagagcacatcgggaggaacagcggcgctcggctgtctcgtcaaagactacttccccgagccggtgaccgtgagctggaattccggagcgttgacctcaggggtgcatacattccctgccgtactgcaatcatcagggctctactcattgtcgagcgtagtgactgtaccgtcgtcatcgctcggaacgcagacgtacatctgcaatgtcaatcacaagccctccaatactaaggtagataagaaagtagaaccgaagtcgtgtgataagacccatacatgccctccgtgccccgcaccggaactcttgggtggcccatcagtctttctgttcccgccaaagcccaaagacacactgatgatttcgcgcacgcccgaagtcacttgcgtcgtggtggatgtgtcgcatgaggacccggaggtcaagttcaactggtacgtcgatggtgtagaagtccacaacgccaagaccaagcctcgggaggagcagtataactccacctaccgggtagtgagcgtgcttacagtgctccatcaggactggctgaacggcaaagaatacaaatgcaaagtcagcaacaaagcgctgccagcgcccatcgagaaaacaattagcaaagcgaaagggcagcccagagaacctcaagtgtatacattgccgccgtcgcgggaggaaatgacaaagaatcaggtatccctgacgtgtcttgtgaaaggcttttacccatccgacattgcggtagagtgggagtcgaatgggcaacccgagaacaactataagacgactcccccagtcttggattcagacggatcctttttcttgtactcgaaactcacagtcgacaagtccagatggcagcaggggaacgtgttcagctgcagcgtgatgcacgaggcccttcacaaccactatacgcagaaatcattaagcttatcgccaggtaaaggaggtggcgggagcgggggagggggatccggtggcggagggtcggaagtgcagctggtggagagcggaggtgggcttgtccaaccgggcaggtcacttagattgtcatgtgcggcgagcggttttacctttgacgattatgcgatgcactgggtccgccaggcaccggggaaggggctcgaatgggtatcaggaatctcgtgggactcggggtccacgggctatgcggactcggtcaaggggcgcttcacaatctcaagggacaatgccaaaaactcgctctatcttcagatgaactcattgcgagctgaggacacggcgctttactactgtgcgcgggatttgggtgcctatcaatgggtagaagggtttgattactgggggcagggaactctcgtgaccgtgtccagcgcatcgacgggaggaggaggttccgggggtgggggaagcgggggtggagggtcatcgtcagagctgacgcaagatcccgcggtatccgtcgcccttgggcagaccgtcaggattacgtgccagggagactcacttagaagctactacgcttcctggtatcagcaaaagccgggacaggcacccgtgttggtgatctacgggaagaataaccggcccagcgggattcctgaccgcttttcgggctcctcatcggggaacacagcctcgttgactatcacgggtgcgcaagccgaggacgaggcagactattactgtgaatcgcgagattcccctggtaatcagtgggtctttgggggaggaactaaggtaacggtattggggtgataa

SEQ ID NO: 49 - protein, 720 aa, Artificial Sequence
  Description of Artificial Sequence: Synthetic polypeptide
  M57-G1-M1.3
EVQLLQSGGGLVQPGGSLRLSCAASGFFFSKYPMHWVRQAPGKGLEWVSSISSDGGATVYADSVKGRFTISRDNSKNTLYLQMNSLRAEDTAVYYCAKDFYTWLTGNAFDSWGQGTSVTVSSASTKGPSVFPLAPSSKSTSGGTAALGCLVKDYFPEPVTVSWNSGALTSGVHTFPAVLQSSGLYSLSSVVTVPSSSLGTQTYICNVNHKPSNTKVDKKVEPKSCDKTHTCPPCPAPELLGGPSVFLFPPKPKDTLMISRTPEVTCVVVDVSHEDPEVKFNWYVDGVEVHNAKTKPREEQYNSTYRVVSVLTVLHQDWLNGKEYKCKVSNKALPAPIEKTISKAKGQPREPQVYTLPPSREEMTKNQVSLTCLVKGFYPSDIAVEWESNGQPENNYKTTPPVLDSDGSFFLYSKLTVDKSRWQQGNVFSCSVMHEALHNHYTQKSLSLSPGGGGGSGGGGSGGGGSQVQLVQSGGGLVQPGGSLRLSCAASGFTFDDYAMHWVRQAPGKGLEWVAGISWDSGSTGYADSVKGRFTISRDNAKNSLYLQMNSLRAEDTALYYCARDLGAYQWVEGFDYWGQGTLVTVSSASTGGGGSGGGGSGGGGSGGGGSSYELTQDPAVSVALGQTVRITCQGDSLRSYYASWYQQKPGQAPVLVIYGKNNRPSGIPDRFSGSTSGNSASLTITGAQAEDEADYYCNSRDSPGNQWVFGGGTKVTVLG

SEQ ID NO: 50 - DNA, 2169 bp, Artificial Sequence
  Description of Artificial Sequence: Synthetic polynucleotide
  M57-G1-M1.3
gaggtgcagttgctccaatccggaggtggacttgtacagccgggtgggtcgctgaggttgtcatgtgcggcgagcggattcttcttctcgaagtaccctatgcactgggtgagacaggctcccggcaaaggattggaatgggtatcatcgatttcgagcgatggcggagccacggtctatgcagactccgtcaaaggccggtttactatctcacgcgataacagcaagaatacactgtatctccagatgaactcgctgagggcggaggacacagccgtgtactactgcgccaaagacttctacacgtggctcaccgggaatgcgtttgatagctggggacaagggacttcggtcacggtgtcctcggctagcactaagggaccgtccgtgtttcccctcgcgcctagctcgaagagcacatcgggaggaacagcggcgctcggctgtctcgtcaaagactacttccccgagccggtgaccgtgagctggaattccggagcgttgacctcaggggtgcatacattccctgccgtactgcaatcatcagggctctactcattgtcgagcgtagtgactgtaccgtcgtcatcgctcggaacgcagacgtacatctgcaatgtcaatcacaagccctccaatactaaggtagataagaaagtagaaccgaagtcgtgtgataagacccatacatgccctccgtgccccgcaccggaactcttgggtggcccatcagtctttctgttcccgccaaagcccaaagacacactgatgatttcgcgcacgcccgaagtcacttgcgtcgtggtggatgtgtcgcatgaggacccggaggtcaagttcaactggtacgtcgatggtgtagaagtccacaacgccaagaccaagcctcgggaggagcagtataactccacctaccgggtagtgagcgtgcttacagtgctccatcaggactggctgaacggcaaagaatacaaatgcaaagtcagcaacaaagcgctgccagcgcccatcgagaaaacaattagcaaagcgaaagggcagcccagagaacctcaagtgtatacattgccgccgtcgcgggaggaaatgacaaagaatcaggtatccctgacgtgtcttgtgaaaggcttttacccatccgacattgcggtagagtgggagtcgaatgggcaacccgagaacaactataagacgactcccccagtcttggattcagacggatcctttttcttgtactcgaaactcacagtcgacaagtccagatggcagcaggggaacgtgttcagctgcagcgtgatgcacgaggcccttcacaaccactatacgcagaaatcattaagcttatcgccaggtaaaggaggtggcgggagcgggggagggggatccggtggcggagggtcgcaagtgcagctggtgcaaagcggaggtgggcttgtccaacccggaggctcacttagattgtcatgtgcggcgagcggttttacctttgacgattatgcgatgcactgggtccgccaggcaccggggaaggggctcgaatgggtagccggaatctcgtgggactcggggtccacgggctatgcggactcggtcaaggggcgcttcacaatctcaagggacaatgccaaaaactcgctctatctgcagatgaactcattgcgagctgaggacacggcgctttactactgtgcgcgggatttgggtgcctatcaatgggtagaagggtttgattactgggggcagggaactctcgtgaccgtgtccagcgcatcgacgggaggaggaggttccgggggtgggggaagcgggggtggagggtcaggaggtgggggatcgtcatacgagctgacgcaagatcccgcggtatccgtcgcccttgggcagaccgtcaggattacgtgccagggagactcacttagaagctactacgcttcctggtatcagcaaaagccgggacaggcacccgtgttggtgatctacgggaagaataaccggcccagcgggattcctgaccgcttttcgggctccacctcagggaactcggcctcgttgactatcacgggtgcgcaagccgaggacgaggcagactattactgtaactcgcgagattcccctggtaatcagtgggtctttgggggaggaactaaggtaacggtattggggtgataa

SEQ ID NO: 51 - protein, 715 aa, Artificial Sequence
  Description of Artificial Sequence: Synthetic polypeptide
  M57-G1-M27
EVQLLQSGGGLVQPGGSLRLSCAASGFFFSKYPMHWVRQAPGKGLEWVSSISSDGGATVYADSVKGRFTISRDNSKNTLYLQMNSLRAEDTAVYYCAKDFYTWLTGNAFDSWGQGTSVTVSSASTKGPSVFPLAPSSKSTSGGTAALGCLVKDYFPEPVTVSWNSGALTSGVHTFPAVLQSSGLYSLSSVVTVPSSSLGTQTYICNVNHKPSNTKVDKKVEPKSCDKTHTCPPCPAPELLGGPSVFLFPPKPKDTLMISRTPEVTCVVVDVSHEDPEVKFNWYVDGVEVHNAKTKPREEQYNSTYRVVSVLTVLHQDWLNGKEYKCKVSNKALPAPIEKTISKAKGQPREPQVYTLPPSREEMTKNQVSLTCLVKGFYPSDIAVEWESNGQPENNYKTTPPVLDSDGSFFLYSKLTVDKSRWQQGNVFSCSVMHEALHNHYTQKSLSLSPGGGGGSGGGGSGGGGSEVQLVESGGGLVQPGRSLRLSCAASGFTFDDYAMHWVRQAPGKGLEWVSGISWNSGSTGYADSVKGRFTISRDNAKNSLYLQMNSLRAEDTALYYCARDLGFNQWVDGFDYWGQGTLVTVSSASTGGGGSGGGGSGGGGSSSELTQDPAVSVALGQTVRITCQGDSLRSYYASWYQQKPGQAPVLVIYGKNNRPSGIPDRFSGSSSGNTASLTITGAQAEDEADYYCNSRDTPGDQWVFGGGTKVTVLG

SEQ ID NO: 52 - DNA, 2154 bp, Artificial Sequence
  Description of Artificial Sequence: Synthetic polynucleotide
  M57-G1-M27
gaggtgcagttgctccaatccggaggtggacttgtacagccgggtgggtcgctgaggttgtcatgtgcggcgagcggattcttcttctcgaagtaccctatgcactgggtgagacaggctcccggcaaaggattggaatgggtatcatcgatttcgagcgatggcggagccacggtctatgcagactccgtcaaaggccggtttactatctcacgcgataacagcaagaatacactgtatctccagatgaactcgctgagggcggaggacacagccgtgtactactgcgccaaagacttctacacgtggctcaccgggaatgcgtttgatagctggggacaagggacttcggtcacggtgtcctcggctagcactaagggaccgtccgtgtttcccctcgcgcctagctcgaagagcacatcgggaggaacagcggcgctcggctgtctcgtcaaagactacttccccgagccggtgaccgtgagctggaattccggagcgttgacctcaggggtgcatacattccctgccgtactgcaatcatcagggctctactcattgtcgagcgtagtgactgtaccgtcgtcatcgctcggaacgcagacgtacatctgcaatgtcaatcacaagccctccaatactaaggtagataagaaagtagaaccgaagtcgtgtgataagacccatacatgccctccgtgccccgcaccggaactcttgggtggcccatcagtctttctgttcccgccaaagcccaaagacacactgatgatttcgcgcacgcccgaagtcacttgcgtcgtggtggatgtgtcgcatgaggacccggaggtcaagttcaactggtacgtcgatggtgtagaagtccacaacgccaagaccaagcctcgggaggagcagtataactccacctaccgggtagtgagcgtgcttacagtgctccatcaggactggctgaacggcaaagaatacaaatgcaaagtcagcaacaaagcgctgccagcgcccatcgagaaaacaattagcaaagcgaaagggcagcccagagaacctcaagtgtatacattgccgccgtcgcgggaggaaatgacaaagaatcaggtatccctgacgtgtcttgtgaaaggcttttacccatccgacattgcggtagagtgggagtcgaatgggcaacccgagaacaactataagacgactcccccagtcttggattcagacggatcctttttcttgtactcgaaactcacagtcgacaagtccagatggcagcaggggaacgtgttcagctgcagcgtgatgcacgaggcccttcacaaccactatacgcagaaatcattaagcttatcgccaggtaaaggaggtggcgggagcgggggagggggatccggtggcggagggtcggaagtgcagctggtggagagcggaggtgggcttgtccaaccgggcaggtcacttagattgtcatgtgcggcgagcggttttacctttgacgattatgcgatgcactgggtccgccaggcaccggggaaggggctcgaatgggtatcaggaatctcgtggaattcggggtccacgggctatgcggactcggtcaaggggcgcttcacaatctcaagggacaatgccaaaaactcgctctatttgcaaatgaactcattgcgagctgaggacacggcgctttactactgtgcgcgggatttgggctttaaccaatgggtagacgggtttgattactgggggcagggaactctcgtgaccgtgtccagcgcatcgacgggaggaggaggttccgggggtgggggaagcgggggtggagggtcatcgtcagagctgacgcaagatcccgcggtatccgtcgcccttgggcagaccgtcaggattacgtgccagggagactcacttagaagctactacgcttcctggtatcagcaaaagccgggacaggcacccgtgttggtgatctacgggaagaataaccggcccagcgggattcctgaccgcttttcgggctcctcatcggggaacacagcctcgttgactatcacgggtgcgcaagccgaggacgaggcagactattactgtaactcgcgagatacgcctggtgaccagtgggtctttgggggaggaactaaggtaacggtattggggtgataa

SEQ ID NO: 53 - protein, 715 aa, Artificial Sequence
  Description of Artificial Sequence: Synthetic polypeptide
  M57-G1-P6
EVQLLQSGGGLVQPGGSLRLSCAASGFFFSKYPMHWVRQAPGKGLEWVSSISSDGGATVYADSVKGRFTISRDNSKNTLYLQMNSLRAEDTAVYYCAKDFYTWLTGNAFDSWGQGTSVTVSSASTKGPSVFPLAPSSKSTSGGTAALGCLVKDYFPEPVTVSWNSGALTSGVHTFPAVLQSSGLYSLSSVVTVPSSSLGTQTYICNVNHKPSNTKVDKKVEPKSCDKTHTCPPCPAPELLGGPSVFLFPPKPKDTLMISRTPEVTCVVVDVSHEDPEVKFNWYVDGVEVHNAKTKPREEQYNSTYRVVSVLTVLHQDWLNGKEYKCKVSNKALPAPIEKTISKAKGQPREPQVYTLPPSREEMTKNQVSLTCLVKGFYPSDIAVEWESNGQPENNYKTTPPVLDSDGSFFLYSKLTVDKSRWQQGNVFSCSVMHEALHNHYTQKSLSLSPGGGGGSGGGGSGGGGSEVQLVESGGGLVQPGRSLRLSCAASGFTFDDYAMHWVRQAPGKGLEWVSGISWNSGSTGYADSVKGRFTISRDNAKNSLYLQMNSLRAEDTALYYCARDLGYNQWLEGFDYWGQGTLVTVSSASTGGGGSGGGGSGGGGSSSELTQDPAVSVALGQTVRITCQGDSLRSYYASWYQQKPGQAPVLVIYGKNNRPSGIPDRFSGSSSGNTASLTITGAQAEDEADYYCMSRDHPGNQWVFGGGTKVTVLG

SEQ ID NO: 54 - DNA, 2154 bp, Artificial Sequence
  Description of Artificial Sequence: Synthetic polynucleotide
  M57-G1-P6
gaggtgcagttgctccaatccggaggtggacttgtacagccgggtgggtcgctgaggttgtcatgtgcggcgagcggattcttcttctcgaagtaccctatgcactgggtgagacaggctcccggcaaaggattggaatgggtatcatcgatttcgagcgatggcggagccacggtctatgcagactccgtcaaaggccggtttactatctcacgcgataacagcaagaatacactgtatctccagatgaactcgctgagggcggaggacacagccgtgtactactgcgccaaagacttctacacgtggctcaccgggaatgcgtttgatagctggggacaagggacttcggtcacggtgtcctcggctagcactaagggaccgtccgtgtttcccctcgcgcctagctcgaagagcacatcgggaggaacagcggcgctcggctgtctcgtcaaagactacttccccgagccggtgaccgtgagctggaattccggagcgttgacctcaggggtgcatacattccctgccgtactgcaatcatcagggctctactcattgtcgagcgtagtgactgtaccgtcgtcatcgctcggaacgcagacgtacatctgcaatgtcaatcacaagccctccaatactaaggtagataagaaagtagaaccgaagtcgtgtgataagacccatacatgccctccgtgccccgcaccggaactcttgggtggcccatcagtctttctgttcccgccaaagcccaaagacacactgatgatttcgcgcacgcccgaagtcacttgcgtcgtggtggatgtgtcgcatgaggacccggaggtcaagttcaactggtacgtcgatggtgtagaagtccacaacgccaagaccaagcctcgggaggagcagtataactccacctaccgggtagtgagcgtgcttacagtgctccatcaggactggctgaacggcaaagaatacaaatgcaaagtcagcaacaaagcgctgccagcgcccatcgagaaaacaattagcaaagcgaaagggcagcccagagaacctcaagtgtatacattgccgccgtcgcgggaggaaatgacaaagaatcaggtatccctgacgtgtcttgtgaaaggcttttacccatccgacattgcggtagagtgggagtcgaatgggcaacccgagaacaactataagacgactcccccagtcttggattcagacggatcctttttcttgtactcgaaactcacagtcgacaagtccagatggcagcaggggaacgtgttcagctgcagcgtgatgcacgaggcccttcacaaccactatacgcagaaatcattaagcttatcgccaggtaaaggaggtggcgggagcgggggagggggatccggtggcggagggtcggaagtgcagctggtggagagcggaggtgggcttgtccaaccgggcaggtcacttagattgtcatgtgcggcgagcggttttacctttgacgattatgcgatgcactgggtccgccaggcaccggggaaggggctcgaatgggtatcaggaatctcgtggaactcggggtccacgggctatgcggactcggtcaaggggcgcttcacaatctcaagggacaatgccaaaaactcgctctatctccagatgaactcattgcgagctgaggacacggcgctttactactgtgcgcgggatttgggttacaaccaatggcttgaagggtttgattactgggggcagggaactctcgtgaccgtgtccagcgcatcgacgggaggaggaggttccgggggtgggggaagcgggggtggagggtcatcgtcagagctgacgcaagatcccgcggtatccgtcgcccttgggcagaccgtcaggattacgtgccagggagactcacttagaagctactacgcttcctggtatcagcaaaagccgggacaggcacccgtgttggtgatctacgggaagaataaccggcccagcgggattcctgaccgcttttcgggctcctcatcggggaacacagcctcgttgactatcacgggtgcgcaagccgaggacgaggcagactattactgtatgtcgcgagatcaccctggtaatcagtgggtctttgggggaggaactaaggtaacggtattggggtgataa

SEQ ID NO: 55 - protein, 715 aa, Artificial Sequence
  Description of Artificial Sequence: Synthetic polypeptide
  M57-G1-B69
EVQLLQSGGGLVQPGGSLRLSCAASGFFFSKYPMHWVRQAPGKGLEWVSSISSDGGATVYADSVKGRFTISRDNSKNTLYLQMNSLRAEDTAVYYCAKDFYTWLTGNAFDSWGQGTSVTVSSASTKGPSVFPLAPSSKSTSGGTAALGCLVKDYFPEPVTVSWNSGALTSGVHTFPAVLQSSGLYSLSSVVTVPSSSLGTQTYICNVNHKPSNTKVDKKVEPKSCDKTHTCPPCPAPELLGGPSVFLFPPKPKDTLMISRTPEVTCVVVDVSHEDPEVKFNWYVDGVEVHNAKTKPREEQYNSTYRVVSVLTVLHQDWLNGKEYKCKVSNKALPAPIEKTISKAKGQPREPQVYTLPPSREEMTKNQVSLTCLVKGFYPSDIAVEWESNGQPENNYKTTPPVLDSDGSFFLYSKLTVDKSRWQQGNVFSCSVMHEALHNHYTQKSLSLSPGGGGGSGGGGSGGGGSEVQLVESGGGLVQPGRSLRLSCAASGFTFDDYAMHWVRQAPGKGLEWVSGISWNSGSVGYADSVKGRFTISRDNAKNSLYLQMNSLRAEDTALYYCARDLGYNQWLEGFDYWGQGTLVTVSSASTGGGGSGGGGSGGGGSSSELTQDPAVSVALGQTVRITCQGDSLRSYYASWYQQKPGQAPVLVIYGKNNRPSGIPDRFSGSSSGNTASLTITGAQAEDEADYYCMSRDSPGNQWVFGGGTKVTVLG

SEQ ID NO: 56 - DNA, 2154 bp, Artificial Sequence
  Description of Artificial Sequence: Synthetic polynucleotide
  M57-G1-B69
gaggtgcagttgctccaatccggaggtggacttgtacagccgggtgggtcgctgaggttgtcatgtgcggcgagcggattcttcttctcgaagtaccctatgcactgggtgagacaggctcccggcaaaggattggaatgggtatcatcgatttcgagcgatggcggagccacggtctatgcagactccgtcaaaggccggtttactatctcacgcgataacagcaagaatacactgtatctccagatgaactcgctgagggcggaggacacagccgtgtactactgcgccaaagacttctacacgtggctcaccgggaatgcgtttgatagctggggacaagggacttcggtcacggtgtcctcggctagcactaagggaccgtccgtgtttcccctcgcgcctagctcgaagagcacatcgggaggaacagcggcgctcggctgtctcgtcaaagactacttccccgagccggtgaccgtgagctggaattccggagcgttgacctcaggggtgcatacattccctgccgtactgcaatcatcagggctctactcattgtcgagcgtagtgactgtaccgtcgtcatcgctcggaacgcagacgtacatctgcaatgtcaatcacaagccctccaatactaaggtagataagaaagtagaaccgaagtcgtgtgataagacccatacatgccctccgtgccccgcaccggaactcttgggtggcccatcagtctttctgttcccgccaaagcccaaagacacactgatgatttcgcgcacgcccgaagtcacttgcgtcgtggtggatgtgtcgcatgaggacccggaggtcaagttcaactggtacgtcgatggtgtagaagtccacaacgccaagaccaagcctcgggaggagcagtataactccacctaccgggtagtgagcgtgcttacagtgctccatcaggactggctgaacggcaaagaatacaaatgcaaagtcagcaacaaagcgctgccagcgcccatcgagaaaacaattagcaaagcgaaagggcagcccagagaacctcaagtgtatacattgccgccgtcgcgggaggaaatgacaaagaatcaggtatccctgacgtgtcttgtgaaaggcttttacccatccgacattgcggtagagtgggagtcgaatgggcaacccgagaacaactataagacgactcccccagtcttggattcagacggatcctttttcttgtactcgaaactcacagtcgacaagtccagatggcagcaggggaacgtgttcagctgcagcgtgatgcacgaggcccttcacaaccactatacgcagaaatcattaagcttatcgccaggtaaaggaggtggcgggagcgggggagggggatccggtggcggagggtcggaagtgcagctggtggagagcggaggtgggcttgtccaaccgggcaggtcacttagattgtcatgtgcggcgagcggttttacctttgacgattatgcgatgcactgggtccgccaggcaccggggaaggggctcgaatgggtatcaggaatctcgtggaactcggggtccgtgggctatgcggactcggtcaaggggcgcttcacaatctcaagggacaatgccaaaaactcgctctacttgcagatgaactcattgcgagctgaggacacggcgctttactactgtgcgcgggatttgggctacaatcaatggttggaagggtttgattactgggggcagggaactctcgtgaccgtgtccagcgcatcgacgggaggaggaggttccgggggtgggggaagcgggggtggagggtcatcgtcagagctgacgcaagatcccgcggtatccgtcgcccttgggcagaccgtcaggattacgtgccagggagactcacttagaagctactacgcttcctggtatcagcaaaagccgggacaggcacccgtgttggtgatctacgggaagaataaccggcccagcgggattcctgaccgcttttcgggctcctcatcggggaacacagcctcgttgactatcacgggtgcgcaagccgaggacgaggcagactattactgtatgtcgcgagattcccctggtaatcagtgggtctttgggggaggaactaaggtaacggtattggggtgataa

SEQ ID NO: 57 - protein, 214 aa, Artificial Sequence
  Description of Artificial Sequence: Synthetic polypeptide
  P1 LAMBDA LIGHT CHAIN
SSELTQDPAVSVALGQTVRITCQGDSLRSYYASWYQQKPGQAPVLVIYGKNNRPSGIPDRFSGSSSGNTASLTITGAQAEDEADYYCESRDSPGNQWVFGGGTKVTVLGQPKAAPSVTLFPPSSEELQANKATLVCLVSDFYPGAVTVAWKADGSPVKVGVETTKPSKQSNNKYAASSYLSLTPEQWKSHRSYSCRVTHEGSTVEKTVAPAECS

SEQ ID NO: 58 - DNA, 648 bp, Artificial Sequence
  Description of Artificial Sequence: Synthetic polynucleotide
  P1 LAMBDA LIGHT CHAIN
tcaagcgaattgacccaagaccccgcagtctccgtggcgcttgggcaaactgtgagaatcacgtgtcaaggagacagccttagaagctactatgcctcgtggtatcagcagaagccaggtcaggccccagtcctcgtgatctacgggaagaacaaccgcccctcgggtattcccgaccgcttttcgggatcgtcctccggaaatacggcttccctgacgatcaccggagcccaagcggaagatgaggcggattactattgcgaatcacgggacagcccgggtaaccagtgggtattcgggggaggcactaaagtaacagtgctcggccagcctaaagcggcaccgtcggtgactctctttcccccgtcatcggaagagcttcaggcgaataaggcgacactggtatgcttggtcagcgatttctacccgggagccgtaacggtcgcgtggaaagcggacgggtcgcccgtgaaagtcggggtcgagacaacgaaaccctcaaaacagtcgaataacaagtacgcggcatcatcatatctctcattgacccctgaacagtggaagagccataggtcgtactcgtgtcgagtcacacacgagggatccaccgtagaaaagacagtggctcctgccgagtgttcctgataa

SEQ ID NO: 59 - protein, 214 aa, Artificial Sequence
  Description of Artificial Sequence: Synthetic polypeptide
  M27 LAMBDA LIGHT CHAIN
SSELTQDPAVSVALGQTVRITCQGDSLRSYYASWYQQKPGQAPVLVIYGKNNRPSGIPDRFSGSSSGNTASLTITGAQAEDEADYYCNSRDTPGDQWVFGGGTKVTVLGQPKAAPSVTLFPPSSEELQANKATLVCLVSDFYPGAVTVAWKADGSPVKVGVETTKPSKQSNNKYAASSYLSLTPEQWKSHRSYSCRVTHEGSTVEKTVAPAECS

SEQ ID NO: 60 - DNA, 648 bp, Artificial Sequence
  Description of Artificial Sequence: Synthetic polynucleotide
  M27 LAMBDA LIGHT CHAIN
tcaagcgaattgacccaagaccccgcagtctccgtggcgcttgggcaaactgtgagaatcacgtgtcaaggagacagccttagaagctactatgcctcgtggtatcagcagaagccaggtcaggccccagtcctcgtgatctacgggaagaacaaccgcccctcgggtattcccgaccgcttttcgggatcgtcctccggaaatacggcttccctgacgatcaccggagcccaagcggaagatgaggcggattactattgcaactcacgggacacaccgggtgaccagtgggtattcgggggaggcactaaagtaacagtgctcggccagcctaaagcggcaccgtcggtgactctctttcccccgtcatcggaagagcttcaggcgaataaggcgacactggtatgcttggtcagcgatttctacccgggagccgtaacggtcgcgtggaaagcggacgggtcgcccgtgaaagtcggggtcgagacaacgaaaccctcaaaacagtcgaataacaagtacgcggcatcatcatatctctcattgacccctgaacagtggaagagccataggtcgtactcgtgtcgagtcacacacgagggatccaccgtagaaaagacagtggctcctgccgagtgttcctgataa

SEQ ID NO: 61 - protein, 214 aa, Artificial Sequence
  Description of Artificial Sequence: Synthetic polypeptide
  M7 LAMBDA LIGHT CHAIN
SSELTQDPAVSVALGQTVRITCQGDSLRSYYASWYQQKPGQAPVLVIYGKNNRPSGIPDRFSGSSSGNTASLTITGAQAEDEADYYCNSRDTPGNKWVFGGGTKVTVIGQPKAAPSVTLFPPSSEELQANKATLVCLVSDFYPGAVTVAWKADGSPVKVGVETTKPSKQSNNKYAASSYLSLTPEQWKSHRSYSCRVTHEGSTVEKTVAPAECS

SEQ ID NO: 62 - DNA, 648 bp, Artificial Sequence
  Description of Artificial Sequence: Synthetic polynucleotide
  M7 LAMBDA LIGHT CHAIN
tcaagcgaattgacccaagaccccgcagtctccgtggcgcttgggcaaactgtgagaatcacgtgtcaaggagacagccttagaagctactatgcctcgtggtatcagcagaagccaggtcaggccccagtcctcgtgatctacgggaagaacaaccgcccctcgggtattcccgaccgcttttcgggatcgtcctccggaaatacggcttccctgacgatcaccggagcccaagcggaagatgaggcggattactattgcaactcacgggacacgccgggtaacaagtgggtattcgggggaggcactaaagtaacagtgattggccagcctaaagcggcaccgtcggtgactctctttcccccgtcatcggaagagcttcaggcgaataaggcgacactggtatgcttggtcagcgatttctacccgggagccgtaacggtcgcgtggaaagcggacgggtcgcccgtgaaagtcggggtcgagacaacgaaaccctcaaaacagtcgaataacaagtacgcggcatcatcatatctctcattgacccctgaacagtggaagagccataggtcgtactcgtgtcgagtcacacacgagggatccaccgtagaaaagacagtggctcctgccgagtgttcctgataa

SEQ ID NO: 63 - protein, 214 aa, Artificial Sequence
  Description of Artificial Sequence: Synthetic polypeptide
  B72 LAMBDA LIGHT CHAIN
SSELTQDPAVSVALGQTVRITCQGDSLRSYYASWYQQKPGQAPVLVIYGKNNRPSGIPDRFSGSSSGNTASLTITGAQAEDEADYYCNSRDVPGDQWVFGGGTKVTVLGQPKAAPSVTLFPPSSEELQANKATLVCLVSDFYPGAVTVAWKADGSPVKVGVETTKPSKQSNNKYAASSYLSLTPEQWKSHRSYSCRVTHEGSTVEKTVAPAECS

SEQ ID NO: 64 - DNA, 648 bp, Artificial Sequence
  Description of Artificial Sequence: Synthetic polynucleotide
  B72 LAMBDA LIGHT CHAIN
tcaagcgaattgacccaagaccccgcagtctccgtggcgcttgggcaaactgtgagaatcacgtgtcaaggagacagccttagaagctactatgcctcgtggtatcagcagaagccaggtcaggccccagtcctcgtgatctacgggaagaacaaccgcccctcgggtattcccgaccgcttttcgggatcgtcctccggaaatacggcttccctgacgatcaccggagcccaagcggaagatgaggcggattactattgcaattcacgggacgtgccgggtgaccagtgggtattcgggggaggcactaaagtaacagtgctcggccagcctaaagcggcaccgtcggtgactctctttcccccgtcatcggaagagcttcaggcgaataaggcgacactggtatgcttggtcagcgatttctacccgggagccgtaacggtcgcgtggaaagcggacgggtcgcccgtgaaagtcggggtcgagacaacgaaaccctcaaaacagtcgaataacaagtacgcggcatcatcatatctctcattgacccctgaacagtggaagagccataggtcgtactcgtgtcgagtcacacacgagggatccaccgtagaaaagacagtggctcctgccgagtgttcctgataa

SEQ ID NO: 65 - protein, 214 aa, Artificial Sequence
  Description of Artificial Sequence: Synthetic polypeptide
  B60 LAMBDA LIGHT CHAIN
SSELTQDPAVSVALGQTVRITCQGDSLRSYYASWYQQKPGQAPVLVIYGKNNRPSGIPDRFSGSSSGNTASLTITGAQAEDEADYYCNSRDWPGNQWVFGGGTKVTVLGQPKAAPSVTLFPPSSEELQANKATLVCLVSDFYPGAVTVAWKADGSPVKVGVETTKPSKQSNNKYAASSYLSLTPEQWKSHRSYSCRVTHEGSTVEKTVAPAECS

SEQ ID NO: 66 - DNA, 648 bp, Artificial Sequence
  Description of Artificial Sequence: Synthetic polynucleotide
  B60 LAMBDA LIGHT CHAIN
tcaagcgaattgacccaagaccccgcagtctccgtggcgcttgggcaaactgtgagaatcacgtgtcaaggagacagccttagaagctactatgcctcgtggtatcagcagaagccaggtcaggccccagtcctcgtgatctacgggaagaacaaccgcccctcgggtattcccgaccgcttttcgggatcgtcctccggaaatacggcttccctgacgatcaccggagcccaagcggaagatgaggcggattactattgcaattcacgggactggccgggtaaccagtgggtattcgggggaggcactaaagtaacagtgctcggccagcctaaagcggcaccgtcggtgactctctttcccccgtcatcggaagagcttcaggcgaataaggcgacactggtatgcttggtcagcgatttctacccgggagccgtaacggtcgcgtggaaagcggacgggtcgcccgtgaaagtcggggtcgagacaacgaaaccctcaaaacagtcgaataacaagtacgcggcatcatcatatctctcattgacccctgaacagtggaagagccataggtcgtactcgtgtcgagtcacacacgagggatccaccgtagaaaagacagtggctcctgccgagtgttcctgataa

SEQ ID NO: 67 - protein, 720 aa, Artificial Sequence
  Description of Artificial Sequence: Synthetic polypeptide
  P1-G1-P4
EVQLVESGGGLVQPGRSLRLSCAASGFTFDDYAMHWVRQAPGKGLEWVSGISWDSGSTGYADSVKGRFTISRDNAKNSLYLQMNSLRAEDTALYYCARDLGAYQWVEGFDYWGQGTLVTVSSASTKGPSVFPLAPSSKSTSGGTAALGCLVKDYFPEPVTVSWNSGALTSGVHTFPAVLQSSGLYSLSSVVTVPSSSLGTQTYICNVNHKPSNTKVDKKVEPKSCDKTHTCPPCPAPELLGGPSVFLFPPKPKDTLMISRTPEVTCVVVDVSHEDPEVKFNWYVDGVEVHNAKTKPREEQYNSTYRVVSVLTVLHQDWLNGKEYKCKVSNKALPAPIEKTISKAKGQPREPQVYTLPPSREEMTKNQVSLTCLVKGFYPSDIAVEWESNGQPENNYKTTPPVLDSDGSFFLYSKLTVDKSRWQQGNVFSCSVMHEALHNHYTQKSLSLSPGGGGGSGGGGSGGGGSEVQLLQSGGGLVQPGGSLRLSCAASGFMFSRYPMHWVRQAPGKGLEWVGSISGSGGATPYADSVKGRFTISRDNSKNTLYLQMNSLRAEDTAVYYCAKDFYQILTGNAFDYWGQGTTVTVSSASTGGGGSGGGGSGGGGSGGGGSDIQMTQSPSSLSASLGDRVTITCRASQGISSYLAWYQQKPGKAPKLLIYAKSTLQSGVPSRFSGSGSGTDFTLTISSLQPEDSATYYCQQYWTFPLTFGGGTKVEIKRT

SEQ ID NO: 68-266 - skipped (199 entries)

SEQ ID NO: 267 - DNA, 2166 bp, Artificial Sequence
  Description of Artificial Sequence: Synthetic polynucleotide
  P1-G1-P4
gaggtccagctcgtcgagtcaggtggaggactggtgcaacccggtcgatcacttcggctgtcgtgtgcggcatcgggattcacgtttgacgattatgccatgcattgggtgcgacaagctccgggcaaagggcttgaatgggtgtccggaatctcgtgggattcggggtcaacgggctatgccgattccgtaaagggtaggttcaccatctcacgcgacaatgcgaagaattcgttgtatcttcagatgaattcgcttagggcagaagatacggccttgtactattgcgcaagggaccttggggcgtaccagtgggtcgagggtttcgattactggggtcagggaaccctggtaacggtgtcgagcgctagcactaagggaccgtccgtgtttcccctcgcgcctagctcgaagagcacatcgggaggaacagcggcgctcggctgtctcgtcaaagactacttccccgagccggtgaccgtgagctggaattccggagcgttgacctcaggggtgcatacattccctgccgtactgcaatcatcagggctctactcattgtcgagcgtagtgactgtaccgtcgtcatcgctcggaacgcagacgtacatctgcaatgtcaatcacaagccctccaatactaaggtagataagaaagtagaaccgaagtcgtgtgataagacccatacatgccctccgtgccccgcaccggaactcttgggtggcccatcagtctttctgttcccgccaaagcccaaagacacactgatgatttcgcgcacgcccgaagtcacttgcgtcgtggtggatgtgtcgcatgaggacccggaggtcaagttcaactggtacgtcgatggtgtagaagtccacaacgccaagaccaagcctcgggaggagcagtataactccacctaccgggtagtgagcgtgcttacagtgctccatcaggactggctgaacggcaaagaatacaaatgcaaagtcagcaacaaagcgctgccagcgcccatcgagaaaacaattagcaaagcgaaagggcagcccagagaacctcaagtgtatacattgccgccgtcgcgggaggaaatgacaaagaatcaggtatccctgacgtgtcttgtgaaaggcttttacccatccgacattgcggtagagtgggagtcgaatgggcaacccgagaacaactataagacgactcccccagtcttggattcagacggatcctttttcttgtactcgaaactcacagtcgacaagtccagatggcagcaggggaacgtgttcagctgcagcgtgatgcacgaggcccttcacaaccactatacgcagaaatcattaagcttatcgccgggtggtgggggaggtagcgggggtggagggtccggaggtgggggaagcgaagtgcaacttctccagtccggagggggcctcgtacaacccggagggtcattgaggctgtcatgtgcagcgtcggggttcatgttttcacggtatcccatgcactgggtgcgacaggcgccagggaaaggcctcgaatgggtaggatccatttcgggatcgggcggtgcaactccctacgccgacagcgtgaagggaaggtttaccatctcacgcgataactcgaaaaacacgctgtacttgcagatgaattcgctgagggcggaagatacggcggtctactattgcgctaaggacttctaccagattttgacaggaaatgcctttgattactggggtcagggcacgacagtaacagtgtcatcggcgtcgacagggggagggggctcgggaggaggcgggtcaggtggagggggatcgggtggcggaggatccgatattcagatgacccagtccccgtccagccttagcgcgagcctgggcgaccgggtcactatcacgtgtcgggcatcccagggtatctcgtcatatctggcgtggtatcaacagaagcctggtaaagccccgaagttgcttatctacgccaagtcaaccctccagtcgggggtccccagcagattttcggggtcgggaagcggaacggacttcacgctcaccatctcaagcctccagccagaggattcagctacgtactattgccaacagtactggacgttccctcttacattcgggggtgggacaaaagtggagattaagagaacttgataa

SEQ ID NO: 268 - skipped

SEQ ID NO: 269 - DNA, 2166 bp, Artificial Sequence
  Description of Artificial Sequence: Synthetic polynucleotide
  P1-G1-M57
gaggtccagctcgtcgagtcaggtggaggactggtgcaacccggtcgatcacttcggctgtcgtgtgcggcatcgggattcacgtttgacgattatgccatgcattgggtgcgacaagctccgggcaaagggcttgaatgggtgtccggaatctcgtgggattcggggtcaacgggctatgccgattccgtaaagggtaggttcaccatctcacgcgacaatgcgaagaattcgttgtatcttcagatgaattcgcttagggcagaagatacggccttgtactattgcgcaagggaccttggggcgtaccagtgggtcgagggtttcgattactggggtcagggaaccctggtaacggtgtcgagcgctagcactaagggaccgtccgtgtttcccctcgcgcctagctcgaagagcacatcgggaggaacagcggcgctcggctgtctcgtcaaagactacttccccgagccggtgaccgtgagctggaattccggagcgttgacctcaggggtgcatacattccctgccgtactgcaatcatcagggctctactcattgtcgagcgtagtgactgtaccgtcgtcatcgctcggaacgcagacgtacatctgcaatgtcaatcacaagccctccaatactaaggtagataagaaagtagaaccgaagtcgtgtgataagacccatacatgccctccgtgccccgcaccggaactcttgggtggcccatcagtctttctgttcccgccaaagcccaaagacacactgatgatttcgcgcacgcccgaagtcacttgcgtcgtggtggatgtgtcgcatgaggacccggaggtcaagttcaactggtacgtcgatggtgtagaagtccacaacgccaagaccaagcctcgggaggagcagtataactccacctaccgggtagtgagcgtgcttacagtgctccatcaggactggctgaacggcaaagaatacaaatgcaaagtcagcaacaaagcgctgccagcgcccatcgagaaaacaattagcaaagcgaaagggcagcccagagaacctcaagtgtatacattgccgccgtcgcgggaggaaatgacaaagaatcaggtatccctgacgtgtcttgtgaaaggcttttacccatccgacattgcggtagagtgggagtcgaatgggcaacccgagaacaactataagacgactcccccagtcttggattcagacggatcctttttcttgtactcgaaactcacagtcgacaagtccagatggcagcaggggaacgtgttcagctgcagcgtgatgcacgaggcccttcacaaccactatacgcagaaatcattaagcttatcgcccggtggaggagggggttccggtggtggtgggtcgggaggaggaggctcggaggtgcagcttctgcagtcgggtggagggctcgtgcagccaggcggctcacttcgcctttcatgcgcggcatcaggctttttcttcagcaagtatcccatgcattgggtcagacaagcaccggggaagggattggaatgggtcagctcaatttcgtcggatgggggagccacagtatacgcggactccgtaaaagggcgattcacaatttcccgcgacaattccaaaaacacgctgtatctccaaatgaactcgcttagggctgaagataccgccgtctactactgtgcgaaggacttttacacttggttgactggtaatgcgttcgattcatgggggcagggcacaagcgtgacagtatcgtccgcctcaacgggaggtggaggtagcggaggcggagggtcgggcggtggtggaagcgggggaggagggagcgacatccagctgacgcagtcaccctcatcgctgtccgcgtcattgggagatcgggtgacgattacttgcagagcatcgcagggaatctcctcgtacctcgcctggtatcaacaaaaacccgggaaagcaccgaaacttctcatctacgcgagatcgacgcgccagagcggagtacctagcaggttctccgggtcgggaagcgggacagagtttaccctcacaatctcgtcattgcagccggaggactcggctacgtactattgtcagcagtattggacctggcctttgacttttggcggagggacgaaggtggagatcaagcggacatgataa

SEQ ID NO: 270 - protein, 720 aa, Artificial Sequence
  Description of Artificial Sequence: Synthetic polypeptide
  P1-G1-M57
EVQLVESGGGLVQPGRSLRLSCAASGFTFDDYAMHWVRQAPGKGLEWVSGISWDSGSTGYADSVKGRFTISRDNAKNSLYLQMNSLRAEDTALYYCARDLGAYQWVEGFDYWGQGTLVTVSSASTKGPSVFPLAPSSKSTSGGTAALGCLVKDYFPEPVTVSWNSGALTSGVHTFPAVLQSSGLYSLSSVVTVPSSSLGTQTYICNVNHKPSNTKVDKKVEPKSCDKTHTCPPCPAPELLGGPSVFLFPPKPKDTLMISRTPEVTCVVVDVSHEDPEVKFNWYVDGVEVHNAKTKPREEQYNSTYRVVSVLTVLHQDWLNGKEYKCKVSNKALPAPIEKTISKAKGQPREPQVYTLPPSREEMTKNQVSLTCLVKGFYPSDIAVEWESNGQPENNYKTTPPVLDSDGSFFLYSKLTVDKSRWQQGNVFSCSVMHEALHNHYTQKSLSLSPGGGGGSGGGGSGGGGSEVQLLQSGGGLVQPGGSLRLSCAASGFFFSKYPMHWVRQAPGKGLEWVSSISSDGGATVYADSVKGRFTISRDNSKNTLYLQMNSLRAEDTAVYYCAKDFYTWLTGNAFDSWGQGTSVTVSSASTGGGGSGGGGSGGGGSGGGGSDIQLTQSPSSLSASLGDRVTITCRASQGISSYLAWYQQKPGKAPKLLIYARSTRQSGVPSRFSGSGSGTEFTLTISSLQPEDSATYYCQQYWTWPLTFGGGTKVEIKRT

SEQ ID NO: 271 - DNA, 2166 bp, Artificial Sequence
  Description of Artificial Sequence: Synthetic polynucleotide
  P1-G1-M78
gaggtccagctcgtcgagtcaggtggaggactggtgcaacccggtcgatcacttcggctgtcgtgtgcggcatcgggattcacgtttgacgattatgccatgcattgggtgcgacaagctccgggcaaagggcttgaatgggtgtccggaatctcgtgggattcggggtcaacgggctatgccgattccgtaaagggtaggttcaccatctcacgcgacaatgcgaagaattcgttgtatcttcagatgaattcgcttagggcagaagatacggccttgtactattgcgcaagggaccttggggcgtaccagtgggtcgagggtttcgattactggggtcagggaaccctggtaacggtgtcgagcgctagcactaagggaccgtccgtgtttcccctcgcgcctagctcgaagagcacatcgggaggaacagcggcgctcggctgtctcgtcaaagactacttccccgagccggtgaccgtgagctggaattccggagcgttgacctcaggggtgcatacattccctgccgtactgcaatcatcagggctctactcattgtcgagcgtagtgactgtaccgtcgtcatcgctcggaacgcagacgtacatctgcaatgtcaatcacaagccctccaatactaaggtagataagaaagtagaaccgaagtcgtgtgataagacccatacatgccctccgtgccccgcaccggaactcttgggtggcccatcagtctttctgttcccgccaaagcccaaagacacactgatgatttcgcgcacgcccgaagtcacttgcgtcgtggtggatgtgtcgcatgaggacccggaggtcaagttcaactggtacgtcgatggtgtagaagtccacaacgccaagaccaagcctcgggaggagcagtataactccacctaccgggtagtgagcgtgcttacagtgctccatcaggactggctgaacggcaaagaatacaaatgcaaagtcagcaacaaagcgctgccagcgcccatcgagaaaacaattagcaaagcgaaagggcagcccagagaacctcaagtgtatacattgccgccgtcgcgggaggaaatgacaaagaatcaggtatccctgacgtgtcttgtgaaaggcttttacccatccgacattgcggtagagtgggagtcgaatgggcaacccgagaacaactataagacgactcccccagtcttggattcagacggatcctttttcttgtactcgaaactcacagtcgacaagtccagatggcagcaggggaacgtgttcagctgcagcgtgatgcacgaggcccttcacaaccactatacgcagaaatcattaagcttatcgcccggaggaggtgggggttccgggggtgggggatccggtggaggagggtccgaggtccaactgctgcagtccggcggagggctcgtgcagcctggcggtagcctgagactttcgtgtgcggccagcgggtttgacttttcatcatatcccatgcactgggtgagacaagctccggggaaaggtcttgaatgggtcggctccatttcgtcatcgggtggtgcgaccccgtacgccgattcggtgaagggacgattcaccatctcgcgggataactcgaagaacactctttatctccagatgaattcgctgaggcccgaagatacggcagtgtattactgtgcgaaagacttctatacgattttgactggcaatgcattcgacatgtggggccagggaacgtcggtaacagtctcaagcgcatcaacaggtggtggagggtcgggaggaggaggaagcggtgggggagggtcagggggaggcggatcggacatccagatgacccagtccccttcctcgctctccgcgtccttgggtgaccgcgtaacgatcacatgcagagcaagccaaggaatttcaagctatcttgcgtggtatcagcagaagccgggtaaagcgcccaagttgttgatctacgccagctccacaaggcagtcgggggtcccctcacgcttttcggggtcgggctcgggaactgacttcaccttgacgatctccagcctccagccagaggattcagggacctactactgccaacagtactgggcgtttcccctgacattcggagggggaacaaaagtagagatcaagcggacgtgataa

SEQ ID NO: 272 - protein, 720 aa, Artificial Sequence
  Description of Artificial Sequence: Synthetic polypeptide
  P1-G1-M78
EVQLVESGGGLVQPGRSLRLSCAASGFTFDDYAMHWVRQAPGKGLEWVSGISWDSGSTGYADSVKGRFTISRDNAKNSLYLQMNSLRAEDTALYYCARDLGAYQWVEGFDYWGQGTLVTVSSASTKGPSVFPLAPSSKSTSGGTAALGCLVKDYFPEPVTVSWNSGALTSGVHTFPAVLQSSGLYSLSSVVTVPSSSLGTQTYICNVNHKPSNTKVDKKVEPKSCDKTHTCPPCPAPELLGGPSVFLFPPKPKDTLMISRTPEVTCVVVDVSHEDPEVKFNWYVDGVEVHNAKTKPREEQYNSTYRVVSVLTVLHQDWLNGKEYKCKVSNKALPAPIEKTISKAKGQPREPQVYTLPPSREEMTKNQVSLTCLVKGFYPSDIAVEWESNGQPENNYKTTPPVLDSDGSFFLYSKLTVDKSRWQQGNVFSCSVMHEALHNHYTQKSLSLSPGGGGGSGGGGSGGGGSEVQLLQSGGGLVQPGGSLRLSCAASGFDFSSYPMHWVRQAPGKGLEWVGSISSSGGATPYADSVKGRFTISRDNSKNTLYLQMNSLRPEDTAVYYCAKDFYTILTGNAFDMWGQGTSVTVSSASTGGGGSGGGGSGGGGSGGGGSDIQMTQSPSSLSASLGDRVTITCRASQGISSYLAWYQQKPGKAPKLLIYASSTRQSGVPSRFSGSGSGTDFTLTISSLQPEDSGTYYCQQYWAFPLTFGGGTKVEIKRT

SEQ ID NO: 273 - DNA, 2166 bp, Artificial Sequence
  Description of Artificial Sequence: Synthetic polynucleotide
  M27-G1-P4
gaggtccagctcgtcgagtcaggtggaggactggtgcaacccggtcgatcacttcggctgtcgtgtgcggcatcgggattcacgtttgacgattatgccatgcattgggtgcgacaagctccgggcaaagggcttgaatgggtgtccggaatctcgtggaactcggggtcaacgggctatgccgattccgtaaagggtaggttcaccatctcacgcgacaatgcgaagaattcgttgtaccttcaaatgaattcgcttagggcagaagatacggccttgtactattgcgcaagggaccttgggttcaaccagtgggtcgacggtttcgattactggggtcagggaaccctggtaacggtgtcgagcgctagcactaagggaccgtccgtgtttcccctcgcgcctagctcgaagagcacatcgggaggaacagcggcgctcggctgtctcgtcaaagactacttccccgagccggtgaccgtgagctggaattccggagcgttgacctcaggggtgcatacattccctgccgtactgcaatcatcagggctctactcattgtcgagcgtagtgactgtaccgtcgtcatcgctcggaacgcagacgtacatctgcaatgtcaatcacaagccctccaatactaaggtagataagaaagtagaaccgaagtcgtgtgataagacccatacatgccctccgtgccccgcaccggaactcttgggtggcccatcagtctttctgttcccgccaaagcccaaagacacactgatgatttcgcgcacgcccgaagtcacttgcgtcgtggtggatgtgtcgcatgaggacccggaggtcaagttcaactggtacgtcgatggtgtagaagtccacaacgccaagaccaagcctcgggaggagcagtataactccacctaccgggtagtgagcgtgcttacagtgctccatcaggactggctgaacggcaaagaatacaaatgcaaagtcagcaacaaagcgctgccagcgcccatcgagaaaacaattagcaaagcgaaagggcagcccagagaacctcaagtgtatacattgccgccgtcgcgggaggaaatgacaaagaatcaggtatccctgacgtgtcttgtgaaaggcttttacccatccgacattgcggtagagtgggagtcgaatgggcaacccgagaacaactataagacgactcccccagtcttggattcagacggatcctttttcttgtactcgaaactcacagtcgacaagtccagatggcagcaggggaacgtgttcagctgcagcgtgatgcacgaggcccttcacaaccactatacgcagaaatcattaagcttatcgccgggtggtgggggaggtagcgggggtggagggtccggaggtgggggaagcgaagtgcaacttctccagtccggagggggcctcgtacaacccggagggtcattgaggctgtcatgtgcagcgtcggggttcatgttttcacggtatcccatgcactgggtgcgacaggcgccagggaaaggcctcgaatgggtaggatccatttcgggatcgggcggtgcaactccctacgccgacagcgtgaagggaaggtttaccatctcacgcgataactcgaaaaacacgctgtacttgcagatgaattcgctgagggcggaagatacggcggtctactattgcgctaaggacttctaccagattttgacaggaaatgcctttgattactggggtcagggcacgacagtaacagtgtcatcggcgtcgacagggggagggggctcgggaggaggcgggtcaggtggagggggatcgggtggcggaggatccgatattcagatgacccagtccccgtccagccttagcgcgagcctgggcgaccgggtcactatcacgtgtcgggcatcccagggtatctcgtcatatctggcgtggtatcaacagaagcctggtaaagccccgaagttgcttatctacgccaagtcaaccctccagtcgggggtccccagcagattttcggggtcgggaagcggaacggacttcacgctcaccatctcaagcctccagccagaggattcagctacgtactattgccaacagtactggacgttccctcttacattcgggggtgggacaaaagtggagattaagagaacttgataa

SEQ ID NO: 274 - protein, 720 aa, Artificial Sequence
  Description of Artificial Sequence: Synthetic polypeptide
  M27-G1-P4
EVQLVESGGGLVQPGRSLRLSCAASGFTFDDYAMHWVRQAPGKGLEWVSGISWNSGSTGYADSVKGRFTISRDNAKNSLYLQMNSLRAEDTALYYCARDLGFNQWVDGFDYWGQGTLVTVSSASTKGPSVFPLAPSSKSTSGGTAALGCLVKDYFPEPVTVSWNSGALTSGVHTFPAVLQSSGLYSLSSVVTVPSSSLGTQTYICNVNHKPSNTKVDKKVEPKSCDKTHTCPPCPAPELLGGPSVFLFPPKPKDTLMISRTPEVTCVVVDVSHEDPEVKFNWYVDGVEVHNAKTKPREEQYNSTYRVVSVLTVLHQDWLNGKEYKCKVSNKALPAPIEKTISKAKGQPREPQVYTLPPSREEMTKNQVSLTCLVKGFYPSDIAVEWESNGQPENNYKTTPPVLDSDGSFFLYSKLTVDKSRWQQGNVFSCSVMHEALHNHYTQKSLSLSPGGGGGSGGGGSGGGGSEVQLLQSGGGLVQPGGSLRLSCAASGFMFSRYPMHWVRQAPGKGLEWVGSISGSGGATPYADSVKGRFTISRDNSKNTLYLQMNSLRAEDTAVYYCAKDFYQILTGNAFDYWGQGTTVTVSSASTGGGGSGGGGSGGGGSGGGGSDIQMTQSPSSLSASLGDRVTITCRASQGISSYLAWYQQKPGKAPKLLIYAKSTLQSGVPSRFSGSGSGTDFTLTISSLQPEDSATYYCQQYWTFPLTFGGGTKVEIKRT

SEQ ID NO: 275 - DNA, 2166 bp, Artificial Sequence
  Description of Artificial Sequence: Synthetic polynucleotide
  M27-G1-M57
gaggtccagctcgtcgagtcaggtggaggactggtgcaacccggtcgatcacttcggctgtcgtgtgcggcatcgggattcacgtttgacgattatgccatgcattgggtgcgacaagctccgggcaaagggcttgaatgggtgtccggaatctcgtggaactcggggtcaacgggctatgccgattccgtaaagggtaggttcaccatctcacgcgacaatgcgaagaattcgttgtaccttcaaatgaattcgcttagggcagaagatacggccttgtactattgcgcaagggaccttgggttcaaccagtgggtcgacggtttcgattactggggtcagggaaccctggtaacggtgtcgagcgctagcactaagggaccgtccgtgtttcccctcgcgcctagctcgaagagcacatcgggaggaacagcggcgctcggctgtctcgtcaaagactacttccccgagccggtgaccgtgagctggaattccggagcgttgacctcaggggtgcatacattccctgccgtactgcaatcatcagggctctactcattgtcgagcgtagtgactgtaccgtcgtcatcgctcggaacgcagacgtacatctgcaatgtcaatcacaagccctccaatactaaggtagataagaaagtagaaccgaagtcgtgtgataagacccatacatgccctccgtgccccgcaccggaactcttgggtggcccatcagtctttctgttcccgccaaagcccaaagacacactgatgatttcgcgcacgcccgaagtcacttgcgtcgtggtggatgtgtcgcatgaggacccggaggtcaagttcaactggtacgtcgatggtgtagaagtccacaacgccaagaccaagcctcgggaggagcagtataactccacctaccgggtagtgagcgtgcttacagtgctccatcaggactggctgaacggcaaagaatacaaatgcaaagtcagcaacaaagcgctgccagcgcccatcgagaaaacaattagcaaagcgaaagggcagcccagagaacctcaagtgtatacattgccgccgtcgcgggaggaaatgacaaagaatcaggtatccctgacgtgtcttgtgaaaggcttttacccatccgacattgcggtagagtgggagtcgaatgggcaacccgagaacaactataagacgactcccccagtcttggattcagacggatcctttttcttgtactcgaaactcacagtcgacaagtccagatggcagcaggggaacgtgttcagctgcagcgtgatgcacgaggcccttcacaaccactatacgcagaaatcattaagcttatcgcccggtggaggagggggttccggtggtggtgggtcgggaggaggaggctcggaggtgcagcttctgcagtcgggtggagggctcgtgcagccaggcggctcacttcgcctttcatgcgcggcatcaggctttttcttcagcaagtatcccatgcattgggtcagacaagcaccggggaagggattggaatgggtcagctcaatttcgtcggatgggggagccacagtatacgcggactccgtaaaagggcgattcacaatttcccgcgacaattccaaaaacacgctgtatctccaaatgaactcgcttagggctgaagataccgccgtctactactgtgcgaaggacttttacacttggttgactggtaatgcgttcgattcatgggggcagggcacaagcgtgacagtatcgtccgcctcaacgggaggtggaggtagcggaggcggagggtcgggcggtggtggaagcgggggaggagggagcgacatccagctgacgcagtcaccctcatcgctgtccgcgtcattgggagatcgggtgacgattacttgcagagcatcgcagggaatctcctcgtacctcgcctggtatcaacaaaaacccgggaaagcaccgaaacttctcatctacgcgagatcgacgcgccagagcggagtacctagcaggttctccgggtcgggaagcgggacagagtttaccctcacaatctcgtcattgcagccggaggactcggctacgtactattgtcagcagtattggacctggcctttgacttttggcggagggacgaaggtggagatcaagcggacatgataa

SEQ ID NO: 276 - protein, 720 aa, Artificial Sequence
  Description of Artificial Sequence: Synthetic polypeptide
  M27-G1-M57
EVQLVESGGGLVQPGRSLRLSCAASGFTFDDYAMHWVRQAPGKGLEWVSGISWNSGSTGYADSVKGRFTISRDNAKNSLYLQMNSLRAEDTALYYCARDLGFNQWVDGFDYWGQGTLVTVSSASTKGPSVFPLAPSSKSTSGGTAALGCLVKDYFPEPVTVSWNSGALTSGVHTFPAVLQSSGLYSLSSVVTVPSSSLGTQTYICNVNHKPSNTKVDKKVEPKSCDKTHTCPPCPAPELLGGPSVFLFPPKPKDTLMISRTPEVTCVVVDVSHEDPEVKFNWYVDGVEVHNAKTKPREEQYNSTYRVVSVLTVLHQDWLNGKEYKCKVSNKALPAPIEKTISKAKGQPREPQVYTLPPSREEMTKNQVSLTCLVKGFYPSDIAVEWESNGQPENNYKTTPPVLDSDGSFFLYSKLTVDKSRWQQGNVFSCSVMHEALHNHYTQKSLSLSPGGGGGSGGGGSGGGGSEVQLLQSGGGLVQPGGSLRLSCAASGFFFSKYPMHWVRQAPGKGLEWVSSISSDGGATVYADSVKGRFTISRDNSKNTLYLQMNSLRAEDTAVYYCAKDFYTWLTGNAFDSWGQGTSVTVSSASTGGGGSGGGGSGGGGSGGGGSDIQLTQSPSSLSASLGDRVTITCRASQGISSYLAWYQQKPGKAPKLLIYARSTRQSGVPSRFSGSGSGTEFTLTISSLQPEDSATYYCQQYWTWPLTFGGGTKVEIKRT

SEQ ID NO: 277 - DNA, 2166 bp, Artificial Sequence
  Description of Artificial Sequence: Synthetic polynucleotide
  M27-G1-M78
gaggtccagctcgtcgagtcaggtggaggactggtgcaacccggtcgatcacttcggctgtcgtgtgcggcatcgggattcacgtttgacgattatgccatgcattgggtgcgacaagctccgggcaaagggcttgaatgggtgtccggaatctcgtggaactcggggtcaacgggctatgccgattccgtaaagggtaggttcaccatctcacgcgacaatgcgaagaattcgttgtaccttcaaatgaattcgcttagggcagaagatacggccttgtactattgcgcaagggaccttgggttcaaccagtgggtcgacggtttcgattactggggtcagggaaccctggtaacggtgtcgagcgctagcactaagggaccgtccgtgtttcccctcgcgcctagctcgaagagcacatcgggaggaacagcggcgctcggctgtctcgtcaaagactacttccccgagccggtgaccgtgagctggaattccggagcgttgacctcaggggtgcatacattccctgccgtactgcaatcatcagggctctactcattgtcgagcgtagtgactgtaccgtcgtcatcgctcggaacgcagacgtacatctgcaatgtcaatcacaagccctccaatactaaggtagataagaaagtagaaccgaagtcgtgtgataagacccatacatgccctccgtgccccgcaccggaactcttgggtggcccatcagtctttctgttcccgccaaagcccaaagacacactgatgatttcgcgcacgcccgaagtcacttgcgtcgtggtggatgtgtcgcatgaggacccggaggtcaagttcaactggtacgtcgatggtgtagaagtccacaacgccaagaccaagcctcgggaggagcagtataactccacctaccgggtagtgagcgtgcttacagtgctccatcaggactggctgaacggcaaagaatacaaatgcaaagtcagcaacaaagcgctgccagcgcccatcgagaaaacaattagcaaagcgaaagggcagcccagagaacctcaagtgtatacattgccgccgtcgcgggaggaaatgacaaagaatcaggtatccctgacgtgtcttgtgaaaggcttttacccatccgacattgcggtagagtgggagtcgaatgggcaacccgagaacaactataagacgactcccccagtcttggattcagacggatcctttttcttgtactcgaaactcacagtcgacaagtccagatggcagcaggggaacgtgttcagctgcagcgtgatgcacgaggcccttcacaaccactatacgcagaaatcattaagcttatcgcccggaggaggtgggggttccgggggtgggggatccggtggaggagggtccgaggtccaactgctgcagtccggcggagggctcgtgcagcctggcggtagcctgagactttcgtgtgcggccagcgggtttgacttttcatcatatcccatgcactgggtgagacaagctccggggaaaggtcttgaatgggtcggctccatttcgtcatcgggtggtgcgaccccgtacgccgattcggtgaagggacgattcaccatctcgcgggataactcgaagaacactctttatctccagatgaattcgctgaggcccgaagatacggcagtgtattactgtgcgaaagacttctatacgattttgactggcaatgcattcgacatgtggggccagggaacgtcggtaacagtctcaagcgcatcaacaggtggtggagggtcgggaggaggaggaagcggtgggggagggtcagggggaggcggatcggacatccagatgacccagtccccttcctcgctctccgcgtccttgggtgaccgcgtaacgatcacatgcagagcaagccaaggaatttcaagctatcttgcgtggtatcagcagaagccgggtaaagcgcccaagttgttgatctacgccagctccacaaggcagtcgggggtcccctcacgcttttcggggtcgggctcgggaactgacttcaccttgacgatctccagcctccagccagaggattcagggacctactactgccaacagtactgggcgtttcccctgacattcggagggggaacaaaagtagagatcaagcggacgtgataa

SEQ ID NO: 278 - protein, 720 aa, Artificial Sequence
  Description of Artificial Sequence: Synthetic polypeptide
  M27-G1-M78
EVQLVESGGGLVQPGRSLRLSCAASGFTFDDYAMHWVRQAPGKGLEWVSGISWNSGSTGYADSVKGRFTISRDNAKNSLYLQMNSLRAEDTALYYCARDLGFNQWVDGFDYWGQGTLVTVSSASTKGPSVFPLAPSSKSTSGGTAALGCLVKDYFPEPVTVSWNSGALTSGVHTFPAVLQSSGLYSLSSVVTVPSSSLGTQTYICNVNHKPSNTKVDKKVEPKSCDKTHTCPPCPAPELLGGPSVFLFPPKPKDTLMISRTPEVTCVVVDVSHEDPEVKFNWYVDGVEVHNAKTKPREEQYNSTYRVVSVLTVLHQDWLNGKEYKCKVSNKALPAPIEKTISKAKGQPREPQVYTLPPSREEMTKNQVSLTCLVKGFYPSDIAVEWESNGQPENNYKTTPPVLDSDGSFFLYSKLTVDKSRWQQGNVFSCSVMHEALHNHYTQKSLSLSPGGGGGSGGGGSGGGGSEVQLLQSGGGLVQPGGSLRLSCAASGFDFSSYPMHWVRQAPGKGLEWVGSISSSGGATPYADSVKGRFTISRDNSKNTLYLQMNSLRPEDTAVYYCAKDFYTILTGNAFDMWGQGTSVTVSSASTGGGGSGGGGSGGGGSGGGGSDIQMTQSPSSLSASLGDRVTITCRASQGISSYLAWYQQKPGKAPKLLIYASSTRQSGVPSRFSGSGSGTDFTLTISSLQPEDSGTYYCQQYWAFPLTFGGGTKVEIKRT

SEQ ID NO: 279 - DNA, 2166 bp, Artificial Sequence
  Description of Artificial Sequence: Synthetic polynucleotide
  M7-G1-P4
gaggtccagctcgtcgagtcaggtggaggactggtgcaacccggtcgatcacttcggctgtcgtgtgcggcatcgggattcacgtttgacgattatgccatgcattgggtgcgacaagctccgggcaaagggcttgaatgggtgtccggaatctcgtgggattcggggtcagtgggctatgccgattccgtaaagggtaggttcaccatctcacgcgacaatgcgaagaattcgttgtacctccaaatgaattcgcttagggcagaagatacggccttgtactattgcgcaagggaccttgggtacaaccagtggtgggaaggtttcgattactggggtcagggaaccctggtaacggtgtcgagcgctagcactaagggaccgtccgtgtttcccctcgcgcctagctcgaagagcacatcgggaggaacagcggcgctcggctgtctcgtcaaagactacttccccgagccggtgaccgtgagctggaattccggagcgttgacctcaggggtgcatacattccctgccgtactgcaatcatcagggctctactcattgtcgagcgtagtgactgtaccgtcgtcatcgctcggaacgcagacgtacatctgcaatgtcaatcacaagccctccaatactaaggtagataagaaagtagaaccgaagtcgtgtgataagacccatacatgccctccgtgccccgcaccggaactcttgggtggcccatcagtctttctgttcccgccaaagcccaaagacacactgatgatttcgcgcacgcccgaagtcacttgcgtcgtggtggatgtgtcgcatgaggacccggaggtcaagttcaactggtacgtcgatggtgtagaagtccacaacgccaagaccaagcctcgggaggagcagtataactccacctaccgggtagtgagcgtgcttacagtgctccatcaggactggctgaacggcaaagaatacaaatgcaaagtcagcaacaaagcgctgccagcgcccatcgagaaaacaattagcaaagcgaaagggcagcccagagaacctcaagtgtatacattgccgccgtcgcgggaggaaatgacaaagaatcaggtatccctgacgtgtcttgtgaaaggcttttacccatccgacattgcggtagagtgggagtcgaatgggcaacccgagaacaactataagacgactcccccagtcttggattcagacggatcctttttcttgtactcgaaactcacagtcgacaagtccagatggcagcaggggaacgtgttcagctgcagcgtgatgcacgaggcccttcacaaccactatacgcagaaatcattaagcttatcgccgggtggtgggggaggtagcgggggtggagggtccggaggtgggggaagcgaagtgcaacttctccagtccggagggggcctcgtacaacccggagggtcattgaggctgtcatgtgcagcgtcggggttcatgttttcacggtatcccatgcactgggtgcgacaggcgccagggaaaggcctcgaatgggtaggatccatttcgggatcgggcggtgcaactccctacgccgacagcgtgaagggaaggtttaccatctcacgcgataactcgaaaaacacgctgtacttgcagatgaattcgctgagggcggaagatacggcggtctactattgcgctaaggacttctaccagattttgacaggaaatgcctttgattactggggtcagggcacgacagtaacagtgtcatcggcgtcgacagggggagggggctcgggaggaggcgggtcaggtggagggggatcgggtggcggaggatccgatattcagatgacccagtccccgtccagccttagcgcgagcctgggcgaccgggtcactatcacgtgtcgggcatcccagggtatctcgtcatatctggcgtggtatcaacagaagcctggtaaagccccgaagttgcttatctacgccaagtcaaccctccagtcgggggtccccagcagattttcggggtcgggaagcggaacggacttcacgctcaccatctcaagcctccagccagaggattcagctacgtactattgccaacagtactggacgttccctcttacattcgggggtgggacaaaagtggagattaagagaacttgataa

SEQ ID NO: 280 - protein, 720 aa, Artificial Sequence
  Description of Artificial Sequence: Synthetic polypeptide
  M7-G1-P4
EVQLVESGGGLVQPGRSLRLSCAASGFTFDDYAMHWVRQAPGKGLEWVSGISWDSGSVGYADSVKGRFTISRDNAKNSLYLQMNSLRAEDTALYYCARDLGYNQWWEGFDYWGQGTLVTVSSASTKGPSVFPLAPSSKSTSGGTAALGCLVKDYFPEPVTVSWNSGALTSGVHTFPAVLQSSGLYSLSSVVTVPSSSLGTQTYICNVNHKPSNTKVDKKVEPKSCDKTHTCPPCPAPELLGGPSVFLFPPKPKDTLMISRTPEVTCVVVDVSHEDPEVKFNWYVDGVEVHNAKTKPREEQYNSTYRVVSVLTVLHQDWLNGKEYKCKVSNKALPAPIEKTISKAKGQPREPQVYTLPPSREEMTKNQVSLTCLVKGFYPSDIAVEWESNGQPENNYKTTPPVLDSDGSFFLYSKLTVDKSRWQQGNVFSCSVMHEALHNHYTQKSLSLSPGGGGGSGGGGSGGGGSEVQLLQSGGGLVQPGGSLRLSCAASGFMFSRYPMHWVRQAPGKGLEWVGSISGSGGATPYADSVKGRFTISRDNSKNTLYLQMNSLRAEDTAVYYCAKDFYQILTGNAFDYWGQGTTVTVSSASTGGGGSGGGGSGGGGSGGGGSDIQMTQSPSSLSASLGDRVTITCRASQGISSYLAWYQQKPGKAPKLLIYAKSTLQSGVPSRFSGSGSGTDFTLTISSLQPEDSATYYCQQYWTFPLTFGGGTKVEIKRT

SEQ ID NO: 281 - DNA, 2166 bp, Artificial Sequence
  Description of Artificial Sequence: Synthetic polynucleotide
  M7-G1-M57
gaggtccagctcgtcgagtcaggtggaggactggtgcaacccggtcgatcacttcggctgtcgtgtgcggcatcgggattcacgtttgacgattatgccatgcattgggtgcgacaagctccgggcaaagggcttgaatgggtgtccggaatctcgtgggattcggggtcagtgggctatgccgattccgtaaagggtaggttcaccatctcacgcgacaatgcgaagaattcgttgtacctccaaatgaattcgcttagggcagaagatacggccttgtactattgcgcaagggaccttgggtacaaccagtggtgggaaggtttcgattactggggtcagggaaccctggtaacggtgtcgagcgctagcactaagggaccgtccgtgtttcccctcgcgcctagctcgaagagcacatcgggaggaacagcggcgctcggctgtctcgtcaaagactacttccccgagccggtgaccgtgagctggaattccggagcgttgacctcaggggtgcatacattccctgccgtactgcaatcatcagggctctactcattgtcgagcgtagtgactgtaccgtcgtcatcgctcggaacgcagacgtacatctgcaatgtcaatcacaagccctccaatactaaggtagataagaaagtagaaccgaagtcgtgtgataagacccatacatgccctccgtgccccgcaccggaactcttgggtggcccatcagtctttctgttcccgccaaagcccaaagacacactgatgatttcgcgcacgcccgaagtcacttgcgtcgtggtggatgtgtcgcatgaggacccggaggtcaagttcaactggtacgtcgatggtgtagaagtccacaacgccaagaccaagcctcgggaggagcagtataactccacctaccgggtagtgagcgtgcttacagtgctccatcaggactggctgaacggcaaagaatacaaatgcaaagtcagcaacaaagcgctgccagcgcccatcgagaaaacaattagcaaagcgaaagggcagcccagagaacctcaagtgtatacattgccgccgtcgcgggaggaaatgacaaagaatcaggtatccctgacgtgtcttgtgaaaggcttttacccatccgacattgcggtagagtgggagtcgaatgggcaacccgagaacaactataagacgactcccccagtcttggattcagacggatcctttttcttgtactcgaaactcacagtcgacaagtccagatggcagcaggggaacgtgttcagctgcagcgtgatgcacgaggcccttcacaaccactatacgcagaaatcattaagcttatcgcccggtggaggagggggttccggtggtggtgggtcgggaggaggaggctcggaggtgcagcttctgcagtcgggtggagggctcgtgcagccaggcggctcacttcgcctttcatgcgcggcatcaggctttttcttcagcaagtatcccatgcattgggtcagacaagcaccggggaagggattggaatgggtcagctcaatttcgtcggatgggggagccacagtatacgcggactccgtaaaagggcgattcacaatttcccgcgacaattccaaaaacacgctgtatctccaaatgaactcgcttagggctgaagataccgccgtctactactgtgcgaaggacttttacacttggttgactggtaatgcgttcgattcatgggggcagggcacaagcgtgacagtatcgtccgcctcaacgggaggtggaggtagcggaggcggagggtcgggcggtggtggaagcgggggaggagggagcgacatccagctgacgcagtcaccctcatcgctgtccgcgtcattgggagatcgggtgacgattacttgcagagcatcgcagggaatctcctcgtacctcgcctggtatcaacaaaaacccgggaaagcaccgaaacttctcatctacgcgagatcgacgcgccagagcggagtacctagcaggttctccgggtcgggaagcgggacagagtttaccctcacaatctcgtcattgcagccggaggactcggctacgtactattgtcagcagtattggacctggcctttgacttttggcggagggacgaaggtggagatcaagcggacatgataa

SEQ ID NO: 282 - protein, 720 aa, Artificial Sequence
  Description of Artificial Sequence: Synthetic polypeptide
  M7-G1-M57
EVQLVESGGGLVQPGRSLRLSCAASGFTFDDYAMHWVRQAPGKGLEWVSGISWDSGSVGYADSVKGRFTISRDNAKNSLYLQMNSLRAEDTALYYCARDLGYNQWWEGFDYWGQGTLVTVSSASTKGPSVFPLAPSSKSTSGGTAALGCLVKDYFPEPVTVSWNSGALTSGVHTFPAVLQSSGLYSLSSVVTVPSSSLGTQTYICNVNHKPSNTKVDKKVEPKSCDKTHTCPPCPAPELLGGPSVFLFPPKPKDTLMISRTPEVTCVVVDVSHEDPEVKFNWYVDGVEVHNAKTKPREEQYNSTYRVVSVLTVLHQDWLNGKEYKCKVSNKALPAPIEKTISKAKGQPREPQVYTLPPSREEMTKNQVSLTCLVKGFYPSDIAVEWESNGQPENNYKTTPPVLDSDGSFFLYSKLTVDKSRWQQGNVFSCSVMHEALHNHYTQKSLSLSPGGGGGSGGGGSGGGGSEVQLLQSGGGLVQPGGSLRLSCAASGFFFSKYPMHWVRQAPGKGLEWVSSISSDGGATVYADSVKGRFTISRDNSKNTLYLQMNSLRAEDTAVYYCAKDFYTWLTGNAFDSWGQGTSVTVSSASTGGGGSGGGGSGGGGSGGGGSDIQLTQSPSSLSASLGDRVTITCRASQGISSYLAWYQQKPGKAPKLLIYARSTRQSGVPSRFSGSGSGTEFTLTISSLQPEDSATYYCQQYWTWPLTFGGGTKVEIKRT

SEQ ID NO: 283 - DNA, 2166 bp, Artificial Sequence
  Description of Artificial Sequence: Synthetic polynucleotide
  M7-G1-M78
gaggtccagctcgtcgagtcaggtggaggactggtgcaacccggtcgatcacttcggctgtcgtgtgcggcatcgggattcacgtttgacgattatgccatgcattgggtgcgacaagctccgggcaaagggcttgaatgggtgtccggaatctcgtgggattcggggtcagtgggctatgccgattccgtaaagggtaggttcaccatctcacgcgacaatgcgaagaattcgttgtacctccaaatgaattcgcttagggcagaagatacggccttgtactattgcgcaagggaccttgggtacaaccagtggtgggaaggtttcgattactggggtcagggaaccctggtaacggtgtcgagcgctagcactaagggaccgtccgtgtttcccctcgcgcctagctcgaagagcacatcgggaggaacagcggcgctcggctgtctcgtcaaagactacttccccgagccggtgaccgtgagctggaattccggagcgttgacctcaggggtgcatacattccctgccgtactgcaatcatcagggctctactcattgtcgagcgtagtgactgtaccgtcgtcatcgctcggaacgcagacgtacatctgcaatgtcaatcacaagccctccaatactaaggtagataagaaagtagaaccgaagtcgtgtgataagacccatacatgccctccgtgccccgcaccggaactcttgggtggcccatcagtctttctgttcccgccaaagcccaaagacacactgatgatttcgcgcacgcccgaagtcacttgcgtcgtggtggatgtgtcgcatgaggacccggaggtcaagttcaactggtacgtcgatggtgtagaagtccacaacgccaagaccaagcctcgggaggagcagtataactccacctaccgggtagtgagcgtgcttacagtgctccatcaggactggctgaacggcaaagaatacaaatgcaaagtcagcaacaaagcgctgccagcgcccatcgagaaaacaattagcaaagcgaaagggcagcccagagaacctcaagtgtatacattgccgccgtcgcgggaggaaatgacaaagaatcaggtatccctgacgtgtcttgtgaaaggcttttacccatccgacattgcggtagagtgggagtcgaatgggcaacccgagaacaactataagacgactcccccagtcttggattcagacggatcctttttcttgtactcgaaactcacagtcgacaagtccagatggcagcaggggaacgtgttcagctgcagcgtgatgcacgaggcccttcacaaccactatacgcagaaatcattaagcttatcgcccggaggaggtgggggttccgggggtgggggatccggtggaggagggtccgaggtccaactgctgcagtccggcggagggctcgtgcagcctggcggtagcctgagactttcgtgtgcggccagcgggtttgacttttcatcatatcccatgcactgggtgagacaagctccggggaaaggtcttgaatgggtcggctccatttcgtcatcgggtggtgcgaccccgtacgccgattcggtgaagggacgattcaccatctcgcgggataactcgaagaacactctttatctccagatgaattcgctgaggcccgaagatacggcagtgtattactgtgcgaaagacttctatacgattttgactggcaatgcattcgacatgtggggccagggaacgtcggtaacagtctcaagcgcatcaacaggtggtggagggtcgggaggaggaggaagcggtgggggagggtcagggggaggcggatcggacatccagatgacccagtccccttcctcgctctccgcgtccttgggtgaccgcgtaacgatcacatgcagagcaagccaaggaatttcaagctatcttgcgtggtatcagcagaagccgggtaaagcgcccaagttgttgatctacgccagctccacaaggcagtcgggggtcccctcacgcttttcggggtcgggctcgggaactgacttcaccttgacgatctccagcctccagccagaggattcagggacctactactgccaacagtactgggcgtttcccctgacattcggagggggaacaaaagtagagatcaagcggacgtgataa

SEQ ID NO: 284 - protein, 720 aa, Artificial Sequence
  Description of Artificial Sequence: Synthetic polypeptide
  M7-G1-M78
EVQLVESGGGLVQPGRSLRLSCAASGFTFDDYAMHWVRQAPGKGLEWVSGISWDSGSVGYADSVKGRFTISRDNAKNSLYLQMNSLRAEDTALYYCARDLGYNQWWEGFDYWGQGTLVTVSSASTKGPSVFPLAPSSKSTSGGTAALGCLVKDYFPEPVTVSWNSGALTSGVHTFPAVLQSSGLYSLSSVVTVPSSSLGTQTYICNVNHKPSNTKVDKKVEPKSCDKTHTCPPCPAPELLGGPSVFLFPPKPKDTLMISRTPEVTCVVVDVSHEDPEVKFNWYVDGVEVHNAKTKPREEQYNSTYRVVSVLTVLHQDWLNGKEYKCKVSNKALPAPIEKTISKAKGQPREPQVYTLPPSREEMTKNQVSLTCLVKGFYPSDIAVEWESNGQPENNYKTTPPVLDSDGSFFLYSKLTVDKSRWQQGNVFSCSVMHEALHNHYTQKSLSLSPGGGGGSGGGGSGGGGSEVQLLQSGGGLVQPGGSLRLSCAASGFDFSSYPMHWVRQAPGKGLEWVGSISSSGGATPYADSVKGRFTISRDNSKNTLYLQMNSLRPEDTAVYYCAKDFYTILTGNAFDMWGQGTSVTVSSASTGGGGSGGGGSGGGGSGGGGSDIQMTQSPSSLSASLGDRVTITCRASQGISSYLAWYQQKPGKAPKLLIYASSTRQSGVPSRFSGSGSGTDFTLTISSLQPEDSGTYYCQQYWAFPLTFGGGTKVEIKRT

SEQ ID NO: 285 - DNA, 2166 bp, Artificial Sequence
  Description of Artificial Sequence: Synthetic polynucleotide
  B72-G1-P4
gaggtccagctcgtcgagtcaggtggaggactggtgcaacccggtcgatcacttcggctgtcgtgtgcggcatcgggattcacgtttgacgattatgccatgcattgggtgcgacaagctccgggcaaagggcttgaatgggtgtccggaatctcgtggaattcggggtcaagaggctatgccgattccgtaaagggtaggttcaccatctcacgcgacaatgcgaagaattcgttgtacttgcagatgaattcgcttagggcagaagatacggccttgtactattgcgcaagggaccttgggttcaatcagtgggaagagggtttcgattactggggtcagggaaccctggtaacggtgtcgagcgctagcactaagggaccgtccgtgtttcccctcgcgcctagctcgaagagcacatcgggaggaacagcggcgctcggctgtctcgtcaaagactacttccccgagccggtgaccgtgagctggaattccggagcgttgacctcaggggtgcatacattccctgccgtactgcaatcatcagggctctactcattgtcgagcgtagtgactgtaccgtcgtcatcgctcggaacgcagacgtacatctgcaatgtcaatcacaagccctccaatactaaggtagataagaaagtagaaccgaagtcgtgtgataagacccatacatgccctccgtgccccgcaccggaactcttgggtggcccatcagtctttctgttcccgccaaagcccaaagacacactgatgatttcgcgcacgcccgaagtcacttgcgtcgtggtggatgtgtcgcatgaggacccggaggtcaagttcaactggtacgtcgatggtgtagaagtccacaacgccaagaccaagcctcgggaggagcagtataactccacctaccgggtagtgagcgtgcttacagtgctccatcaggactggctgaacggcaaagaatacaaatgcaaagtcagcaacaaagcgctgccagcgcccatcgagaaaacaattagcaaagcgaaagggcagcccagagaacctcaagtgtatacattgccgccgtcgcgggaggaaatgacaaagaatcaggtatccctgacgtgtcttgtgaaaggcttttacccatccgacattgcggtagagtgggagtcgaatgggcaacccgagaacaactataagacgactcccccagtcttggattcagacggatcctttttcttgtactcgaaactcacagtcgacaagtccagatggcagcaggggaacgtgttcagctgcagcgtgatgcacgaggcccttcacaaccactatacgcagaaatcattaagcttatcgccgggtggtgggggaggtagcgggggtggagggtccggaggtgggggaagcgaagtgcaacttctccagtccggagggggcctcgtacaacccggagggtcattgaggctgtcatgtgcagcgtcggggttcatgttttcacggtatcccatgcactgggtgcgacaggcgccagggaaaggcctcgaatgggtaggatccatttcgggatcgggcggtgcaactccctacgccgacagcgtgaagggaaggtttaccatctcacgcgataactcgaaaaacacgctgtacttgcagatgaattcgctgagggcggaagatacggcggtctactattgcgctaaggacttctaccagattttgacaggaaatgcctttgattactggggtcagggcacgacagtaacagtgtcatcggcgtcgacagggggagggggctcgggaggaggcgggtcaggtggagggggatcgggtggcggaggatccgatattcagatgacccagtccccgtccagccttagcgcgagcctgggcgaccgggtcactatcacgtgtcgggcatcccagggtatctcgtcatatctggcgtggtatcaacagaagcctggtaaagccccgaagttgcttatctacgccaagtcaaccctccagtcgggggtccccagcagattttcggggtcgggaagcggaacggacttcacgctcaccatctcaagcctccagccagaggattcagctacgtactattgccaacagtactggacgttccctcttacattcgggggtgggacaaaagtggagattaagagaacttgataa

SEQ ID NO: 286 - protein, 720 aa, Artificial Sequence
  Description of Artificial Sequence: Synthetic polypeptide
  B72-G1-P4
EVQLVESGGGLVQPGRSLRLSCAASGFTFDDYAMHWVRQAPGKGLEWVSGISWNSGSRGYADSVKGRFTISRDNAKNSLYLQMNSLRAEDTALYYCARDLGFNQWEEGFDYWGQGTLVTVSSASTKGPSVFPLAPSSKSTSGGTAALGCLVKDYFPEPVTVSWNSGALTSGVHTFPAVLQSSGLYSLSSVVTVPSSSLGTQTYICNVNHKPSNTKVDKKVEPKSCDKTHTCPPCPAPELLGGPSVFLFPPKPKDTLMISRTPEVTCVVVDVSHEDPEVKFNWYVDGVEVHNAKTKPREEQYNSTYRVVSVLTVLHQDWLNGKEYKCKVSNKALPAPIEKTISKAKGQPREPQVYTLPPSREEMTKNQVSLTCLVKGFYPSDIAVEWESNGQPENNYKTTPPVLDSDGSFFLYSKLTVDKSRWQQGNVFSCSVMHEALHNHYTQKSLSLSPGGGGGSGGGGSGGGGSEVQLLQSGGGLVQPGGSLRLSCAASGFMFSRYPMHWVRQAPGKGLEWVGSISGSGGATPYADSVKGRFTISRDNSKNTLYLQMNSLRAEDTAVYYCAKDFYQILTGNAFDYWGQGTTVTVSSASTGGGGSGGGGSGGGGSGGGGSDIQMTQSPSSLSASLGDRVTITCRASQGISSYLAWYQQKPGKAPKLLIYAKSTLQSGVPSRFSGSGSGTDFTLTISSLQPEDSATYYCQQYWTFPLTFGGGTKVEIKRT

SEQ ID NO: 287 - DNA, 2166 bp, Artificial Sequence
  Description of Artificial Sequence: Synthetic polynucleotide
  B72-G1-M57
gaggtccagctcgtcgagtcaggtggaggactggtgcaacccggtcgatcacttcggctgtcgtgtgcggcatcgggattcacgtttgacgattatgccatgcattgggtgcgacaagctccgggcaaagggcttgaatgggtgtccggaatctcgtggaattcggggtcaagaggctatgccgattccgtaaagggtaggttcaccatctcacgcgacaatgcgaagaattcgttgtacttgcagatgaattcgcttagggcagaagatacggccttgtactattgcgcaagggaccttgggttcaatcagtgggaagagggtttcgattactggggtcagggaaccctggtaacggtgtcgagcgctagcactaagggaccgtccgtgtttcccctcgcgcctagctcgaagagcacatcgggaggaacagcggcgctcggctgtctcgtcaaagactacttccccgagccggtgaccgtgagctggaattccggagcgttgacctcaggggtgcatacattccctgccgtactgcaatcatcagggctctactcattgtcgagcgtagtgactgtaccgtcgtcatcgctcggaacgcagacgtacatctgcaatgtcaatcacaagccctccaatactaaggtagataagaaagtagaaccgaagtcgtgtgataagacccatacatgccctccgtgccccgcaccggaactcttgggtggcccatcagtctttctgttcccgccaaagcccaaagacacactgatgatttcgcgcacgcccgaagtcacttgcgtcgtggtggatgtgtcgcatgaggacccggaggtcaagttcaactggtacgtcgatggtgtagaagtccacaacgccaagaccaagcctcgggaggagcagtataactccacctaccgggtagtgagcgtgcttacagtgctccatcaggactggctgaacggcaaagaatacaaatgcaaagtcagcaacaaagcgctgccagcgcccatcgagaaaacaattagcaaagcgaaagggcagcccagagaacctcaagtgtatacattgccgccgtcgcgggaggaaatgacaaagaatcaggtatccctgacgtgtcttgtgaaaggcttttacccatccgacattgcggtagagtgggagtcgaatgggcaacccgagaacaactataagacgactcccccagtcttggattcagacggatcctttttcttgtactcgaaactcacagtcgacaagtccagatggcagcaggggaacgtgttcagctgcagcgtgatgcacgaggcccttcacaaccactatacgcagaaatcattaagcttatcgcccggtggaggagggggttccggtggtggtgggtcgggaggaggaggctcggaggtgcagcttctgcagtcgggtggagggctcgtgcagccaggcggctcacttcgcctttcatgcgcggcatcaggctttttcttcagcaagtatcccatgcattgggtcagacaagcaccggggaagggattggaatgggtcagctcaatttcgtcggatgggggagccacagtatacgcggactccgtaaaagggcgattcacaatttcccgcgacaattccaaaaacacgctgtatctccaaatgaactcgcttagggctgaagataccgccgtctactactgtgcgaaggacttttacacttggttgactggtaatgcgttcgattcatgggggcagggcacaagcgtgacagtatcgtccgcctcaacgggaggtggaggtagcggaggcggagggtcgggcggtggtggaagcgggggaggagggagcgacatccagctgacgcagtcaccctcatcgctgtccgcgtcattgggagatcgggtgacgattacttgcagagcatcgcagggaatctcctcgtacctcgcctggtatcaacaaaaacccgggaaagcaccgaaacttctcatctacgcgagatcgacgcgccagagcggagtacctagcaggttctccgggtcgggaagcgggacagagtttaccctcacaatctcgtcattgcagccggaggactcggctacgtactattgtcagcagtattggacctggcctttgacttttggcggagggacgaaggtggagatcaagcggacatgataa

SEQ ID NO: 288 - protein, 720 aa, Artificial Sequence
  Description of Artificial Sequence: Synthetic polypeptide
  B72-G1-M57
EVQLVESGGGLVQPGRSLRLSCAASGFTFDDYAMHWVRQAPGKGLEWVSGISWNSGSRGYADSVKGRFTISRDNAKNSLYLQMNSLRAEDTALYYCARDLGFNQWEEGFDYWGQGTLVTVSSASTKGPSVFPLAPSSKSTSGGTAALGCLVKDYFPEPVTVSWNSGALTSGVHTFPAVLQSSGLYSLSSVVTVPSSSLGTQTYICNVNHKPSNTKVDKKVEPKSCDKTHTCPPCPAPELLGGPSVFLFPPKPKDTLMISRTPEVTCVVVDVSHEDPEVKFNWYVDGVEVHNAKTKPREEQYNSTYRVVSVLTVLHQDWLNGKEYKCKVSNKALPAPIEKTISKAKGQPREPQVYTLPPSREEMTKNQVSLTCLVKGFYPSDIAVEWESNGQPENNYKTTPPVLDSDGSFFLYSKLTVDKSRWQQGNVFSCSVMHEALHNHYTQKSLSLSPGGGGGSGGGGSGGGGSEVQLLQSGGGLVQPGGSLRLSCAASGFFFSKYPMHWVRQAPGKGLEWVSSISSDGGATVYADSVKGRFTISRDNSKNTLYLQMNSLRAEDTAVYYCAKDFYTWLTGNAFDSWGQGTSVTVSSASTGGGGSGGGGSGGGGSGGGGSDIQLTQSPSSLSASLGDRVTITCRASQGISSYLAWYQQKPGKAPKLLIYARSTRQSGVPSRFSGSGSGTEFTLTISSLQPEDSATYYCQQYWTWPLTFGGGTKVEIKRT

SEQ ID NO: 289 - DNA, 2166 bp, Artificial Sequence
  Description of Artificial Sequence: Synthetic polynucleotide
  B72-G1-M78
gaggtccagctcgtcgagtcaggtggaggactggtgcaacccggtcgatcacttcggctgtcgtgtgcggcatcgggattcacgtttgacgattatgccatgcattgggtgcgacaagctccgggcaaagggcttgaatgggtgtccggaatctcgtggaattcggggtcaagaggctatgccgattccgtaaagggtaggttcaccatctcacgcgacaatgcgaagaattcgttgtacttgcagatgaattcgcttagggcagaagatacggccttgtactattgcgcaagggaccttgggttcaatcagtgggaagagggtttcgattactggggtcagggaaccctggtaacggtgtcgagcgctagcactaagggaccgtccgtgtttcccctcgcgcctagctcgaagagcacatcgggaggaacagcggcgctcggctgtctcgtcaaagactacttccccgagccggtgaccgtgagctggaattccggagcgttgacctcaggggtgcatacattccctgccgtactgcaatcatcagggctctactcattgtcgagcgtagtgactgtaccgtcgtcatcgctcggaacgcagacgtacatctgcaatgtcaatcacaagccctccaatactaaggtagataagaaagtagaaccgaagtcgtgtgataagacccatacatgccctccgtgccccgcaccggaactcttgggtggcccatcagtctttctgttcccgccaaagcccaaagacacactgatgatttcgcgcacgcccgaagtcacttgcgtcgtggtggatgtgtcgcatgaggacccggaggtcaagttcaactggtacgtcgatggtgtagaagtccacaacgccaagaccaagcctcgggaggagcagtataactccacctaccgggtagtgagcgtgcttacagtgctccatcaggactggctgaacggcaaagaatacaaatgcaaagtcagcaacaaagcgctgccagcgcccatcgagaaaacaattagcaaagcgaaagggcagcccagagaacctcaagtgtatacattgccgccgtcgcgggaggaaatgacaaagaatcaggtatccctgacgtgtcttgtgaaaggcttttacccatccgacattgcggtagagtgggagtcgaatgggcaacccgagaacaactataagacgactcccccagtcttggattcagacggatcctttttcttgtactcgaaactcacagtcgacaagtccagatggcagcaggggaacgtgttcagctgcagcgtgatgcacgaggcccttcacaaccactatacgcagaaatcattaagcttatcgcccggaggaggtgggggttccgggggtgggggatccggtggaggagggtccgaggtccaactgctgcagtccggcggagggctcgtgcagcctggcggtagcctgagactttcgtgtgcggccagcgggtttgacttttcatcatatcccatgcactgggtgagacaagctccggggaaaggtcttgaatgggtcggctccatttcgtcatcgggtggtgcgaccccgtacgccgattcggtgaagggacgattcaccatctcgcgggataactcgaagaacactctttatctccagatgaattcgctgaggcccgaagatacggcagtgtattactgtgcgaaagacttctatacgattttgactggcaatgcattcgacatgtggggccagggaacgtcggtaacagtctcaagcgcatcaacaggtggtggagggtcgggaggaggaggaagcggtgggggagggtcagggggaggcggatcggacatccagatgacccagtccccttcctcgctctccgcgtccttgggtgaccgcgtaacgatcacatgcagagcaagccaaggaatttcaagctatcttgcgtggtatcagcagaagccgggtaaagcgcccaagttgttgatctacgccagctccacaaggcagtcgggggtcccctcacgcttttcggggtcgggctcgggaactgacttcaccttgacgatctccagcctccagccagaggattcagggacctactactgccaacagtactgggcgtttcccctgacattcggagggggaacaaaagtagagatcaagcggacgtgataa

SEQ ID NO: 290 - protein, 720 aa, Artificial Sequence
  Description of Artificial Sequence: Synthetic polypeptide
  B72-G1-M78
EVQLVESGGGLVQPGRSLRLSCAASGFTFDDYAMHWVRQAPGKGLEWVSGISWNSGSRGYADSVKGRFTISRDNAKNSLYLQMNSLRAEDTALYYCARDLGFNQWEEGFDYWGQGTLVTVSSASTKGPSVFPLAPSSKSTSGGTAALGCLVKDYFPEPVTVSWNSGALTSGVHTFPAVLQSSGLYSLSSVVTVPSSSLGTQTYICNVNHKPSNTKVDKKVEPKSCDKTHTCPPCPAPELLGGPSVFLFPPKPKDTLMISRTPEVTCVVVDVSHEDPEVKFNWYVDGVEVHNAKTKPREEQYNSTYRVVSVLTVLHQDWLNGKEYKCKVSNKALPAPIEKTISKAKGQPREPQVYTLPPSREEMTKNQVSLTCLVKGFYPSDIAVEWESNGQPENNYKTTPPVLDSDGSFFLYSKLTVDKSRWQQGNVFSCSVMHEALHNHYTQKSLSLSPGGGGGSGGGGSGGGGSEVQLLQSGGGLVQPGGSLRLSCAASGFDFSSYPMHWVRQAPGKGLEWVGSISSSGGATPYADSVKGRFTISRDNSKNTLYLQMNSLRPEDTAVYYCAKDFYTILTGNAFDMWGQGTSVTVSSASTGGGGSGGGGSGGGGSGGGGSDIQMTQSPSSLSASLGDRVTITCRASQGISSYLAWYQQKPGKAPKLLIYASSTRQSGVPSRFSGSGSGTDFTLTISSLQPEDSGTYYCQQYWAFPLTFGGGTKVEIKRT

SEQ ID NO: 291 - DNA, 2166 bp, Artificial Sequence
  Description of Artificial Sequence: Synthetic polynucleotide
  B60-G1-P4
gaggtccagctcgtcgagtcaggtggaggactggtgcaacccggtcgatcacttcggctgtcgtgtgcggcatcgggattcacgtttgacgattatgccatgcattgggtgcgacaagctccgggcaaagggcttgaatgggtgtccggaatctcgtgggattcggggtcagtgggctatgccgattccgtaaagggtaggttcaccatctcacgcgacaatgcgaagaattcgttgtatcttcagatgaattcgcttagggcagaagatacggccttgtactattgcgcaagggaccttggggcgtaccagtgggaggagggtttcgattactggggtcagggaaccctggtaacggtgtcgagcgctagcactaagggaccgtccgtgtttcccctcgcgcctagctcgaagagcacatcgggaggaacagcggcgctcggctgtctcgtcaaagactacttccccgagccggtgaccgtgagctggaattccggagcgttgacctcaggggtgcatacattccctgccgtactgcaatcatcagggctctactcattgtcgagcgtagtgactgtaccgtcgtcatcgctcggaacgcagacgtacatctgcaatgtcaatcacaagccctccaatactaaggtagataagaaagtagaaccgaagtcgtgtgataagacccatacatgccctccgtgccccgcaccggaactcttgggtggcccatcagtctttctgttcccgccaaagcccaaagacacactgatgatttcgcgcacgcccgaagtcacttgcgtcgtggtggatgtgtcgcatgaggacccggaggtcaagttcaactggtacgtcgatggtgtagaagtccacaacgccaagaccaagcctcgggaggagcagtataactccacctaccgggtagtgagcgtgcttacagtgctccatcaggactggctgaacggcaaagaatacaaatgcaaagtcagcaacaaagcgctgccagcgcccatcgagaaaacaattagcaaagcgaaagggcagcccagagaacctcaagtgtatacattgccgccgtcgcgggaggaaatgacaaagaatcaggtatccctgacgtgtcttgtgaaaggcttttacccatccgacattgcggtagagtgggagtcgaatgggcaacccgagaacaactataagacgactcccccagtcttggattcagacggatcctttttcttgtactcgaaactcacagtcgacaagtccagatggcagcaggggaacgtgttcagctgcagcgtgatgcacgaggcccttcacaaccactatacgcagaaatcattaagcttatcgccgggtggtgggggaggtagcgggggtggagggtccggaggtgggggaagcgaagtgcaacttctccagtccggagggggcctcgtacaacccggagggtcattgaggctgtcatgtgcagcgtcggggttcatgttttcacggtatcccatgcactgggtgcgacaggcgccagggaaaggcctcgaatgggtaggatccatttcgggatcgggcggtgcaactccctacgccgacagcgtgaagggaaggtttaccatctcacgcgataactcgaaaaacacgctgtacttgcagatgaattcgctgagggcggaagatacggcggtctactattgcgctaaggacttctaccagattttgacaggaaatgcctttgattactggggtcagggcacgacagtaacagtgtcatcggcgtcgacagggggagggggctcgggaggaggcgggtcaggtggagggggatcgggtggcggaggatccgatattcagatgacccagtccccgtccagccttagcgcgagcctgggcgaccgggtcactatcacgtgtcgggcatcccagggtatctcgtcatatctggcgtggtatcaacagaagcctggtaaagccccgaagttgcttatctacgccaagtcaaccctccagtcgggggtccccagcagattttcggggtcgggaagcggaacggacttcacgctcaccatctcaagcctccagccagaggattcagctacgtactattgccaacagtactggacgttccctcttacattcgggggtgggacaaaagtggagattaagagaacttgataa

SEQ ID NO: 292 - protein, 720 aa, Artificial Sequence
  Description of Artificial Sequence: Synthetic polypeptide
  B60-G1-P4
EVQLVESGGGLVQPGRSLRLSCAASGFTFDDYAMHWVRQAPGKGLEWVSGISWDSGSVGYADSVKGRFTISRDNAKNSLYLQMNSLRAEDTALYYCARDLGAYQWEEGFDYWGQGTLVTVSSASTKGPSVFPLAPSSKSTSGGTAALGCLVKDYFPEPVTVSWNSGALTSGVHTFPAVLQSSGLYSLSSVVTVPSSSLGTQTYICNVNHKPSNTKVDKKVEPKSCDKTHTCPPCPAPELLGGPSVFLFPPKPKDTLMISRTPEVTCVVVDVSHEDPEVKFNWYVDGVEVHNAKTKPREEQYNSTYRVVSVLTVLHQDWLNGKEYKCKVSNKALPAPIEKTISKAKGQPREPQVYTLPPSREEMTKNQVSLTCLVKGFYPSDIAVEWESNGQPENNYKTTPPVLDSDGSFFLYSKLTVDKSRWQQGNVFSCSVMHEALHNHYTQKSLSLSPGGGGGSGGGGSGGGGSEVQLLQSGGGLVQPGGSLRLSCAASGFMFSRYPMHWVRQAPGKGLEWVGSISGSGGATPYADSVKGRFTISRDNSKNTLYLQMNSLRAEDTAVYYCAKDFYQILTGNAFDYWGQGTTVTVSSASTGGGGSGGGGSGGGGSGGGGSDIQMTQSPSSLSASLGDRVTITCRASQGISSYLAWYQQKPGKAPKLLIYAKSTLQSGVPSRFSGSGSGTDFTLTISSLQPEDSATYYCQQYWTFPLTFGGGTKVEIKRT

SEQ ID NO: 293 - DNA, 2166 bp, Artificial Sequence
  Description of Artificial Sequence: Synthetic polynucleotide
  B60-G1-M57
gaggtccagctcgtcgagtcaggtggaggactggtgcaacccggtcgatcacttcggctgtcgtgtgcggcatcgggattcacgtttgacgattatgccatgcattgggtgcgacaagctccgggcaaagggcttgaatgggtgtccggaatctcgtgggattcggggtcagtgggctatgccgattccgtaaagggtaggttcaccatctcacgcgacaatgcgaagaattcgttgtatcttcagatgaattcgcttagggcagaagatacggccttgtactattgcgcaagggaccttggggcgtaccagtgggaggagggtttcgattactggggtcagggaaccctggtaacggtgtcgagcgctagcactaagggaccgtccgtgtttcccctcgcgcctagctcgaagagcacatcgggaggaacagcggcgctcggctgtctcgtcaaagactacttccccgagccggtgaccgtgagctggaattccggagcgttgacctcaggggtgcatacattccctgccgtactgcaatcatcagggctctactcattgtcgagcgtagtgactgtaccgtcgtcatcgctcggaacgcagacgtacatctgcaatgtcaatcacaagccctccaatactaaggtagataagaaagtagaaccgaagtcgtgtgataagacccatacatgccctccgtgccccgcaccggaactcttgggtggcccatcagtctttctgttcccgccaaagcccaaagacacactgatgatttcgcgcacgcccgaagtcacttgcgtcgtggtggatgtgtcgcatgaggacccggaggtcaagttcaactggtacgtcgatggtgtagaagtccacaacgccaagaccaagcctcgggaggagcagtataactccacctaccgggtagtgagcgtgcttacagtgctccatcaggactggctgaacggcaaagaatacaaatgcaaagtcagcaacaaagcgctgccagcgcccatcgagaaaacaattagcaaagcgaaagggcagcccagagaacctcaagtgtatacattgccgccgtcgcgggaggaaatgacaaagaatcaggtatccctgacgtgtcttgtgaaaggcttttacccatccgacattgcggtagagtgggagtcgaatgggcaacccgagaacaactataagacgactcccccagtcttggattcagacggatcctttttcttgtactcgaaactcacagtcgacaagtccagatggcagcaggggaacgtgttcagctgcagcgtgatgcacgaggcccttcacaaccactatacgcagaaatcattaagcttatcgcccggtggaggagggggttccggtggtggtgggtcgggaggaggaggctcggaggtgcagcttctgcagtcgggtggagggctcgtgcagccaggcggctcacttcgcctttcatgcgcggcatcaggctttttcttcagcaagtatcccatgcattgggtcagacaagcaccggggaagggattggaatgggtcagctcaatttcgtcggatgggggagccacagtatacgcggactccgtaaaagggcgattcacaatttcccgcgacaattccaaaaacacgctgtatctccaaatgaactcgcttagggctgaagataccgccgtctactactgtgcgaaggacttttacacttggttgactggtaatgcgttcgattcatgggggcagggcacaagcgtgacagtatcgtccgcctcaacgggaggtggaggtagcggaggcggagggtcgggcggtggtggaagcgggggaggagggagcgacatccagctgacgcagtcaccctcatcgctgtccgcgtcattgggagatcgggtgacgattacttgcagagcatcgcagggaatctcctcgtacctcgcctggtatcaacaaaaacccgggaaagcaccgaaacttctcatctacgcgagatcgacgcgccagagcggagtacctagcaggttctccgggtcgggaagcgggacagagtttaccctcacaatctcgtcattgcagccggaggactcggctacgtactattgtcagcagtattggacctggcctttgacttttggcggagggacgaaggtggagatcaagcggacatgataa

SEQ ID NO: 294 - protein, 720 aa, Artificial Sequence
  Description of Artificial Sequence: Synthetic polypeptide
  B60-G1-M57
EVQLVESGGGLVQPGRSLRLSCAASGFTFDDYAMHWVRQAPGKGLEWVSGISWDSGSVGYADSVKGRFTISRDNAKNSLYLQMNSLRAEDTALYYCARDLGAYQWEEGFDYWGQGTLVTVSSASTKGPSVFPLAPSSKSTSGGTAALGCLVKDYFPEPVTVSWNSGALTSGVHTFPAVLQSSGLYSLSSVVTVPSSSLGTQTYICNVNHKPSNTKVDKKVEPKSCDKTHTCPPCPAPELLGGPSVFLFPPKPKDTLMISRTPEVTCVVVDVSHEDPEVKFNWYVDGVEVHNAKTKPREEQYNSTYRVVSVLTVLHQDWLNGKEYKCKVSNKALPAPIEKTISKAKGQPREPQVYTLPPSREEMTKNQVSLTCLVKGFYPSDIAVEWESNGQPENNYKTTPPVLDSDGSFFLYSKLTVDKSRWQQGNVFSCSVMHEALHNHYTQKSLSLSPGGGGGSGGGGSGGGGSEVQLLQSGGGLVQPGGSLRLSCAASGFFFSKYPMHWVRQAPGKGLEWVSSISSDGGATVYADSVKGRFTISRDNSKNTLYLQMNSLRAEDTAVYYCAKDFYTWLTGNAFDSWGQGTSVTVSSASTGGGGSGGGGSGGGGSGGGGSDIQLTQSPSSLSASLGDRVTITCRASQGISSYLAWYQQKPGKAPKLLIYARSTRQSGVPSRFSGSGSGTEFTLTISSLQPEDSATYYCQQYWTWPLTFGGGTKVEIKRT

SEQ ID NO: 295 - DNA, 2166 bp, Artificial Sequence
  Description of Artificial Sequence: Synthetic polynucleotide
  B60-G1-M78
gaggtccagctcgtcgagtcaggtggaggactggtgcaacccggtcgatcacttcggctgtcgtgtgcggcatcgggattcacgtttgacgattatgccatgcattgggtgcgacaagctccgggcaaagggcttgaatgggtgtccggaatctcgtgggattcggggtcagtgggctatgccgattccgtaaagggtaggttcaccatctcacgcgacaatgcgaagaattcgttgtatcttcagatgaattcgcttagggcagaagatacggccttgtactattgcgcaagggaccttggggcgtaccagtgggaggagggtttcgattactggggtcagggaaccctggtaacggtgtcgagcgctagcactaagggaccgtccgtgtttcccctcgcgcctagctcgaagagcacatcgggaggaacagcggcgctcggctgtctcgtcaaagactacttccccgagccggtgaccgtgagctggaattccggagcgttgacctcaggggtgcatacattccctgccgtactgcaatcatcagggctctactcattgtcgagcgtagtgactgtaccgtcgtcatcgctcggaacgcagacgtacatctgcaatgtcaatcacaagccctccaatactaaggtagataagaaagtagaaccgaagtcgtgtgataagacccatacatgccctccgtgccccgcaccggaactcttgggtggcccatcagtctttctgttcccgccaaagcccaaagacacactgatgatttcgcgcacgcccgaagtcacttgcgtcgtggtggatgtgtcgcatgaggacccggaggtcaagttcaactggtacgtcgatggtgtagaagtccacaacgccaagaccaagcctcgggaggagcagtataactccacctaccgggtagtgagcgtgcttacagtgctccatcaggactggctgaacggcaaagaatacaaatgcaaagtcagcaacaaagcgctgccagcgcccatcgagaaaacaattagcaaagcgaaagggcagcccagagaacctcaagtgtatacattgccgccgtcgcgggaggaaatgacaaagaatcaggtatccctgacgtgtcttgtgaaaggcttttacccatccgacattgcggtagagtgggagtcgaatgggcaacccgagaacaactataagacgactcccccagtcttggattcagacggatcctttttcttgtactcgaaactcacagtcgacaagtccagatggcagcaggggaacgtgttcagctgcagcgtgatgcacgaggcccttcacaaccactatacgcagaaatcattaagcttatcgcccggaggaggtgggggttccgggggtgggggatccggtggaggagggtccgaggtccaactgctgcagtccggcggagggctcgtgcagcctggcggtagcctgagactttcgtgtgcggccagcgggtttgacttttcatcatatcccatgcactgggtgagacaagctccggggaaaggtcttgaatgggtcggctccatttcgtcatcgggtggtgcgaccccgtacgccgattcggtgaagggacgattcaccatctcgcgggataactcgaagaacactctttatctccagatgaattcgctgaggcccgaagatacggcagtgtattactgtgcgaaagacttctatacgattttgactggcaatgcattcgacatgtggggccagggaacgtcggtaacagtctcaagcgcatcaacaggtggtggagggtcgggaggaggaggaagcggtgggggagggtcagggggaggcggatcggacatccagatgacccagtccccttcctcgctctccgcgtccttgggtgaccgcgtaacgatcacatgcagagcaagccaaggaatttcaagctatcttgcgtggtatcagcagaagccgggtaaagcgcccaagttgttgatctacgccagctccacaaggcagtcgggggtcccctcacgcttttcggggtcgggctcgggaactgacttcaccttgacgatctccagcctccagccagaggattcagggacctactactgccaacagtactgggcgtttcccctgacattcggagggggaacaaaagtagagatcaagcggacgtgataa

SEQ ID NO: 296 - protein, 720 aa, Artificial Sequence
  Description of Artificial Sequence: Synthetic polypeptide
  B60-G1-M78
EVQLVESGGGLVQPGRSLRLSCAASGFTFDDYAMHWVRQAPGKGLEWVSGISWDSGSVGYADSVKGRFTISRDNAKNSLYLQMNSLRAEDTALYYCARDLGAYQWEEGFDYWGQGTLVTVSSASTKGPSVFPLAPSSKSTSGGTAALGCLVKDYFPEPVTVSWNSGALTSGVHTFPAVLQSSGLYSLSSVVTVPSSSLGTQTYICNVNHKPSNTKVDKKVEPKSCDKTHTCPPCPAPELLGGPSVFLFPPKPKDTLMISRTPEVTCVVVDVSHEDPEVKFNWYVDGVEVHNAKTKPREEQYNSTYRVVSVLTVLHQDWLNGKEYKCKVSNKALPAPIEKTISKAKGQPREPQVYTLPPSREEMTKNQVSLTCLVKGFYPSDIAVEWESNGQPENNYKTTPPVLDSDGSFFLYSKLTVDKSRWQQGNVFSCSVMHEALHNHYTQKSLSLSPGGGGGSGGGGSGGGGSEVQLLQSGGGLVQPGGSLRLSCAASGFDFSSYPMHWVRQAPGKGLEWVGSISSSGGATPYADSVKGRFTISRDNSKNTLYLQMNSLRPEDTAVYYCAKDFYTILTGNAFDMWGQGTSVTVSSASTGGGGSGGGGSGGGGSGGGGSDIQMTQSPSSLSASLGDRVTITCRASQGISSYLAWYQQKPGKAPKLLIYASSTRQSGVPSRFSGSGSGTDFTLTISSLQPEDSGTYYCQQYWAFPLTFGGGTKVEIKRT

SEQ ID NO: 297 - DNA, 702 bp, Artificial Sequence
  Description of Artificial Sequence: Synthetic polynucleotide
  Nucleotide sequence encoding the light chain of 16F with a leader sequence
atgggcacgcctgcgcagttgctcttcctgttgctcctttggctgcccgacacgacgggggacattcagatgactcagagcccttcgtcccttagcgcatcaacaggggatcgagtaacgattacttgcagagcctcacaaggtatttcatcgtatctcgcatggtaccaacaaaagccgggtaaagctccgaaactcttgatctacgccgcgagcactctgcagtccggagtgccctcacgcttctcgggatcggggtcagggactgacttcacgctgaccatctccagcttgcagccagaggattttgcaacatactattgccagcagtacttcacgttccctcttacatttggaggtggaacaaaagtcgaaatcaaaaggacagtggctgcgccctcggtctttatctttccgccgtcggatgagcaactcaagtcggggactgcctcggtggtatgtttgctcaacaatttctatccccgggaagcgaaggtacagtggaaggtcgataatgccctccagagcggcaactcgcaagagtcagtcacagaacaggattccaaggactcgacgtattcactttcctcgacattgaccttgagcaaggccgactacgagaagcacaaagtgtatgcgtgtgaggtcacgcatcagggcctgtcatcgccagtgaccaagtcgtttaacagaggcgaatgc

SEQ ID NO: 298 - skipped

SEQ ID NO: 299 - DNA, 2217 bp, Artificial Sequence
  Description of Artificial Sequence: Synthetic polynucleotide
  Nucleotide sequence encoding the heavy chain of 16F with a leader sequence
atgggcttcggtttgtcctggctgtttctggtcgctattcttaaaggagtgcagtgcgaggtgcagctcctccaaagcggagggggtttggtccagcccggtggctcgttgcgcctctcatgtgccgcgtcggggtttacattcagcgtctatccgatgcactgggtacgacaggcgccagggaaaggactggagtgggtgtcatcgatcagcagctccggaggtgctacaagatatgccgactcggtgaaaggccgctttacgatcagccgcgataacagcaagaatacgttgtacctccaaatgaactcgctgcgagccgaggacactgcggtgtactattgcgcgaaggatttctatgacatccttactggtaatgcgtttgatatctggggccaggggacaacggtcaccgtgagctcggccagcacgaaggggcctagcgtctttccgctcgccccctcgtcaaaatcaacgtcgggtggaacggccgcattgggttgtctcgtaaaggactactttccggaacccgtcaccgtatcgtggaattcaggcgccctgacttccggggtccacacctttcccgctgtcttgcagtcctcgggtttgtattcactgtcgtcagtggtgacagtaccatcatcctcactgggaactcaaacgtacatctgcaacgtgaaccacaagccgagcaacactaaggtggataagaaggtagagcccaagtcatgcgacaaaacgcatacatgcccgccatgccccgcaccagaacttttgggaggtccgtcagtgtttctctttccgcctaagcccaaagacacactgatgatttcccggacgcccgaagtcacttgtgtggtcgtcgacgtgtcccatgaagatcccgaagtaaagttcaactggtatgtcgacggtgtggaagtccacaatgcaaaaaccaagcccagggaagaacagtacaacagcacatatcgagtggtgagcgtgttgaccgtgctgcaccaagactggctcaatggaaaggagtacaaatgcaaagtgtccaacaaggcactgcctgcgcccattgagaaaacgatttcgaaagcaaagggacagccaagagaaccccaagtgtatacccttcccccgtcgcgcgaggaaatgacgaagaaccaggtatcgttgacgtgtcttgtaaagggattctatccctcggacatcgcggtcgagtgggagtccaacggacagccagagaataactacaaaaccacaccgcctgtgctggattccgacgggtcgtttttcttgtattcgaagcttacggtagacaaaagccggtggcagcagggtaatgtgttcagctgctcagtaatgcacgaggctctccataatcattacactcagaagtccctttccctttcgccgggagggggtgggggatccggcggaggtgggtcgggaggtggaggatcacaagtgcaattggtacagtcgggaggcgggcttgtgcaacccggagggtcactgcgcctttcatgtgcggcgagcggtttcacgttcgatgattatgcgatgcattgggtacggcaggcacctggcaaagggttggagtgggtagccggaatctcgtggaatagcgggagcatcggttatgcggattccgtcaaagggaggtttacaatttcgagggacaatgcgaagaacagcctgtatctccaaatgaattcgctcaggcccgaagataccgccgtctactactgcgcgagggacttgggatacaaccagtgggtggaagggtttgattactgggggcaggggactctggtaactgtctcatcggcatcgactggtggtggcgggtccggagggggaggaagcggaggaggcgggagcggaggcggtgggtccagctacgaactgactcaagatccggccgtatcggtggccctcggacaaacagtgcgaatcacctgtcagggggatagccttagatcgtactacgcttcgtggtatcagcaaaagcccggacaggcaccagtgcttgtgatctacggaaagaacaatagaccgagcggaattccggatcggttttcgggttcgacttccggaaattcggcgtcgctcacgatcaccggagctcaggcagaggatgaagcggattactattgtaattcccgcgattcgtcggggaatcattgggtgttcggtgggggtacaaaggtaactgtactcggc

SEQ ID NO: 300 - protein, 739 aa, Artificial Sequence
  Description of Artificial Sequence: Synthetic polypeptide
  SF-G1-C8 (16F)
MGFGLSWLFLVAILKGVQCEVQLLQSGGGLVQPGGSLRLSCAASGFTFSVYPMHWVRQAPGKGLEWVSSISSSGGATRYADSVKGRFTISRDNSKNTLYLQMNSLRAEDTAVYYCAKDFYDILTGNAFDIWGQGTTVTVSSASTKGPSVFPLAPSSKSTSGGTAALGCLVKDYFPEPVTVSWNSGALTSGVHTFPAVLQSSGLYSLSSVVTVPSSSLGTQTYICNVNHKPSNTKVDKKVEPKSCDKTHTCPPCPAPELLGGPSVFLFPPKPKDTLMISRTPEVTCVVVDVSHEDPEVKFNWYVDGVEVHNAKTKPREEQYNSTYRVVSVLTVLHQDWLNGKEYKCKVSNKALPAPIEKTISKAKGQPREPQVYTLPPSREEMTKNQVSLTCLVKGFYPSDIAVEWESNGQPENNYKTTPPVLDSDGSFFLYSKLTVDKSRWQQGNVFSCSVMHEALHNHYTQKSLSLSPGGGGGSGGGGSGGGGSQVQLVQSGGGLVQPGGSLRLSCAASGFTFDDYAMHWVRQAPGKGLEWVAGISWNSGSIGYADSVKGRFTISRDNAKNSLYLQMNSLRPEDTAVYYCARDLGYNQWVEGFDYWGQGTLVTVSSASTGGGGSGGGGSGGGGSGGGGSSYELTQDPAVSVALGQTVRITCQGDSLRSYYASWYQQKPGQAPVLVIYGKNNRPSGIPDRFSGSTSGNSASLTITGAQAEDEADYYCNSRDSSGNHWVFGGGTKVTVLG

SEQ ID NO: 301-315 - skipped (15 entries)

SEQ ID NO: 316 - protein, 708 aa, Artificial Sequence
  Description of Artificial Sequence: Synthetic polypeptide
  Heavy chain of ELI-7
EVQLLESGGGLVQPGGSLRLSCAASGFTFSAYNMRWVRQAPGKGLEWVSVIYPSGGATRYADSVKGRFTISRDNSKNTLYLQMNSLRAEDTAVYYCARGYYYYGMDVWGQGTLVTVSSASTKGPSVFPLAPCSRSTSESTAALGCLVKDYFPEPVTVSWNSGALTSGVHTFPAVLQSSGLYSLSSVVTVPSSNFGTQTYTCNVDHKPSNTKVDKTVERKCCVECPPCPAPPVAGPSVFLFPPKPKDTLMISRTPEVTCVVVDVSHEDPEVQFNWYVDGVEVHNAKTKPREEQFNSTFRVVSVLTVVHQDWLNGKEYKCKVSNKGLPAPIEKTISKTKGQPREPQVYTLPPSREEMTKNQVSLTCLVKGFYPSDIAVEWESNGQPENNYKTTPPMLDSDGSFFLYSKLTVDKSRWQQGNVFSCSVMHEALHNHYTQKSLSLSPGKGGGGSGGGGSGGGGSLQEVQLLESGGGLVQPGGSLRLSCAASGFTFSVYPMHWVRQAPGKGLEWVSSISSSGGATRYADSVKGRFTISRDNSKNTLYLQMNSLRAEDTAVYYCAKDFYDILTGNAFDIWGQGTMVTVSSASTGGGGSGGGGSGGGGSDIQMTQSPSSFSASTGDRVTITCRASQGISSYLAWYQQKPGKAPKLLIYAASTLQSGVPSRFSGSGSGTDFTLTISSLQPEDSATYYCQQYFTFPLTFGGGTKVEIK

SEQ ID NO: 317 - protein, 216 aa, Artificial Sequence
  Description of Artificial Sequence: Synthetic polypeptide
  Light chain of ELI-7
QSVLTQPPSASGTPGQRVTISCSGSDSNIGRNYIYWYQQFPGTAPKLLIYRNNQRPSGVPDRISGSKSGTSASLAISGLRSEDEAEYHCGTWDDSLSGPVFGGGTKLTVLGQPKAAPSVTLFPPSSEELQANKATLVCLISDFYPGAVTVAWKADSSPVKAGVETTTPSKQSNNKYAASSYLSLTPEQWKSHRSYSCQVTHEGSTVEKTVAPTECS

SEQ ID NO: 318 - protein, 712 aa, Artificial Sequence [sequence omitted]

SEQ ID NO: 319 - protein, 711 aa, Artificial Sequence
  Description of Artificial Sequence: Synthetic polypeptide
  Heavy chain of ILE-12
EVQLLESGGGLVQPGGSLRLSCAASGFTFSVYPMHWVRQAPGKGLEWVSSISSSGGATRYADSVKGRFTISRDNSKNTLYLQMNSLRAEDTAVYYCAKDFYDILTGNAFDIWGQGTMVTVSSASTKGPSVFPLAPCSRSTSESTAALGCLVKDYFPEPVTVSWNSGALTSGVHTFPAVLQSSGLYSLSSVVTVPSSNFGTQTYTCNVDHKPSNTKVDKTVERKCCVECPPCPAPPVAGPSVFLFPPKPKDTLMISRTPEVTCVVVDVSHEDPEVQFNWYVDGVEVHNAKTKPREEQFNSTFRVVSVLTVVHQDWLNGKEYKCKVSNKGLPAPIEKTISKTKGQPREPQVYTLPPSREEMTKNQVSLTCLVKGFYPSDIAVEWESNGQPENNYKTTPPMLDSDGSFFLYSKLTVDKSRWQQGNVFSCSVMHEALHNHYTQKSLSLSPGKGGGGSGGGGSGGGGSLQEVQLLESGGGLVQPGGSLRLSCAASGFTFSVYDMYWVRQAPGKGLEWVSYIYSSGGDTDYADSVKGRFTISRDNSKNTLYLQMNSLRAEDTATYYCARASTNSIYDAMDVWGQGTTVTVSSASTGGGGSGGGGSGGGGSDIQMTQSPSSVSASVGDRVTITCRASQDITNWLAWYQQKPGKAPTLLIYDASTLQSGVPSRFSGSGSGTDFTLTISSLQPEDFATYFCQQANGFPLTFGGGTKVEIK

SEQ ID NO: 320 - protein, 214 aa, Artificial Sequence
  Description of Artificial Sequence: Synthetic polypeptide
  Light chain of ILE-10 and IL-12
DIQMTQSPSSFSASTGDRVTITCRASQGISSYLAWYQQKPGKAPKLLIYAASTLQSGVPSRFSGSGSGTDFTLTISSLQPEDSATYYCQQYFTFPLTFGGGTKVEIKRTVAAPSVFIFPPSDEQLKSGTASVVCLLNNFYPREAKVQWKVDNALQSGNSQESVTEQDSKDSTYSLSSTLTLSKADYEKHKVYACEVTHQGLSSPVTKSFNRGEC

SEQ ID NO: 321 - protein, 223 aa, Artificial Sequence
  Description of Artificial Sequence: Synthetic polypeptide
  CP-751,871 Fab, Fab-HC
EVQLLESGGGLVQPGGSLRLSCTASGFTFSSYAMNWVRQAPGKGLEWVSAISGSGGTTFYADSVKGRFTISRDNSRTTLYLQMNSLRAEDTAVYYCAKDLGWSDSYYYYYGMDVWGQGTTVTVSSASTKGPSVFPLAPSSKSTSGGTAALGCLVKDYFPEPVTVSWNSGALTSGVHTFPAVLQSSGLYSLSSVVTVPSSSLGTQTYICNVNHKPSNTKVDKKV

SEQ ID NO: 322 - protein, 214 aa, Artificial Sequence
  Description of Artificial Sequence: Synthetic polypeptide
  CP-751,871 Fab, Fab-LC
DIQMTQFPSSLSASVGDRVTITCRASQGIRNDLGWYQQKPGKAPKRLIYAASRLHRGVPSRFSGSGSGTEFTLTISSLQPEDFATYYCLQHNSYPCSFGQGTKLEIKRTVAAPSVFIFPPSDEQLKSGTASVVCLLNNFYPREAKVQWKVDNALQSGNSQESVTEQDSKDSTYSLSSTLTLSKADYEKHKVYACEVTHQGLSSPVTKSFNRGEC

SEQ ID NO: 323 - protein, 257 aa, Artificial Sequence
  Description of Artificial Sequence: Synthetic polypeptide
  CP-751,871 scFv
EVQLLESGGGLVQPGGSLRLSCTASGFTFSSYAMNWVRQAPGKGLEWVSAISGSGGTTFYADSVKGRFTISRDNSRTTLYLQMNSLRAEDTAVYYCAKDLGWSDSYYYYYGMDVWGQGTTVTVSSASTGGGGSGGGGSGGGGSGGGGSDIQMTQFPSSLSASVGDRVTITCRASQGIRNDLGWYQQKPGKAPKRLIYAASRLHRGVPSRFSGSGSGTEFTLTISSLQPEDFATYYCLQHNSYPCSFGQGTKLEIKRT

SEQ ID NO: 324 - protein, 228 aa, Artificial Sequence
  Description of Artificial Sequence: Synthetic polypeptide
  IMC-A12 Fab, Fab-HC
EVQLVQSGAEVKKPGSSVKVSCKASGGTFSSYAISWVRQAPGQGLEWMGGIIPIFGTANYAQKFQGRVTITADKSTSTAYMELSSLRSEDTAVYYCARAPLRFLEWSTQDHYYYYYMDVWGKGTTVTVSSASTKGPSVFPLAPSSKSTSGGTAALGCLVKDYFPEPVTVSWNSGALTSGVHTFPAVLQSSGLYSLSSVVTVPSSSLGTQTYICNVNHKPSNTKVDKKV

SEQ ID NO: 325 - protein, 214 aa, Artificial Sequence
  Description of Artificial Sequence: Synthetic polypeptide
  IMC-A12 Fab, Fab-LC
SSELTQDPAVSVALGQTVRITCQGDSLRSYYATWYQQKPGQAPILVIYGENKRPSGIPDRFSGSSSGNTASLTITGAQAEDEADYYCKSRDGSGQHLVFGGGTKLTVLGQPKAAPSVTLFPPSSEELQANKATLVCLISDFYPGAVTVAWKADSSPVKAGVETTTPSKQSNNKYAASSYLSLTPEQWKSHRSYSCQVTHEGSTVEKTVAPAECS

SEQ ID NO: 326 - protein, 262 aa, Artificial Sequence
  Description of Artificial Sequence: Synthetic polypeptide
  IMC-A12 scFV
EVQLVQSGAEVKKPGSSVKVSCKASGGTFSSYAISWVRQAPGQGLEWMGGIIPIFGTANYAQKFQGRVTITADKSTSTAYMELSSLRSEDTAVYYCARAPLRFLEWSTQDHYYYYYMDVWGKGTTVTVSSASTGGGGSGGGGSGGGGSGGGGSSSELTQDPAVSVALGQTVRITCQGDSLRSYYATWYQQKPGQAPILVIYGENKRPSGIPDRFSGSSSGNTASLTITGAQAEDEADYYCKSRDGSGQHLVFGGGTKLTVLG

SEQ ID NO: 327 - protein, 217 aa, Artificial Sequence
  Description of Artificial Sequence: Synthetic polypeptide
  AMG-479 Fab, Fab-HC
QVQLQESGPGLVKPSGTLSLTCAVSGGSISSSNWWSWVRQPPGKGLEWIGEIYHSGSTNYNPSLKSRVTISVDKSKNQFSLKLSSVTAADTAVYYCARWTGRTDAFDIWGQGTMVTVSSASTKGPSVFPLAPSSKSTSGGTAALGCLVKDYFPEPVTVSWNSGALTSGVHTFPAVLQSSGLYSLSSVVTVPSSSLGTQTYICNVNHKPSNTKVDKKV

SEQ ID NO: 328 - protein, 219 aa, Artificial Sequence
  Description of Artificial Sequence: Synthetic polypeptide
  AMG-479 Fab, Fab-LC
DVVMTQSPLSLPVTPGEPASISCRSSQSLLHSNGYNYLDWYLQKPGQSPQLLIYLGSNRASGVPDRFSGSGSGTDFTLKISRVEAEDVGVYYCMQGTHWPLTFGQGTKVEIKRTVAAPSVFIFPPSDEQLKSGTASVVCLLNNFYPREAKVQWKVDNALQSGNSQESVTEQDSKDSTYSLSSTLTLSKADYEKHKVYACEVTHQGLSSPVTKSFNRGEC

SEQ ID NO: 329 - protein, 256 aa, Artificial Sequence
  Description of Artificial Sequence: Synthetic polypeptide
  AMG-479 scFv
QVQLQESGPGLVKPSGTLSLTCAVSGGSISSSNWWSWVRQPPGKGLEWIGEIYHSGSTNYNPSLKSRVTISVDKSKNQFSLKLSSVTAADTAVYYCARWTGRTDAFDIWGQGTMVTVSSASTGGGGSGGGGSGGGGSGGGGSDVVMTQSPLSLPVTPGEPASISCRSSQSLLHSNGYNYLDWYLQKPGQSPQLLIYLGSNRASGVPDRFSGSGSGTDFTLKISRVEAEDVGVYYCMQGTHWPLTFGQGTKVEIKRT

SEQ ID NO: 330 - protein, 222 aa, Artificial Sequence
  Description of Artificial Sequence: Synthetic polypeptide
  BIIB-G11 Fab, Fab-HC
EVQLLESGGGLVQPGGSLRLSCAASGFTFSNYPMYWVRQAPGKGLEWVSRISSSGGRTVYADSVKGRFTISRDNSKNTLYLQMNSLRAEDTAVYYCARDRWSRSAAEYGLGGYWGQGTLVTVSSASTKGPSVFPLAPSSKSTSGGTAALGCLVKDYFPEPVTVSWNSGALTSGVHTFPAVLQSSGLYSLSSVVTVPSSSLGTQTYICNVNHKPSNTKVDKKV

SEQ ID NO: 331 - protein, 219 aa, Artificial Sequence
  Description of Artificial Sequence: Synthetic polypeptide
  BIIB-G11 Fab, Fab-LC
DIQMTQSPDSLAVSLGERATINCKSSQSVLYSSNNKNYLAWYQQKPGQPPKLLIYLASTRESGVPDRFSGSGSGTDFTLTISSLQAEDVAVYYCQQYYSTWTFGQGTKVEIKRTVAAPSVFIFPPSDEQLKSGTASVVCLLNNFYPREAKVQWKVDNALQSGNSQESVTEQDSKDSTYSLSSTLTLSKADYEKHKVYACEVTHQGLSSPVTKSFNRGEC

SEQ ID NO: 332 - protein, 261 aa, Artificial Sequence
  Description of Artificial Sequence: Synthetic polypeptide
  BIIB-G11 scFv
EVQLLESGGGLVQPGGSLRLSCAASGFTFSNYPMYWVRQAPGKGLEWVSRISSSGGRTVYADSVKGRFTISRDNSKNTLYLQMNSLRAEDTAVYYCARDRWSRSAAEYGLGGYWGQGTLVTVSSASTGGGGSGGGGSGGGGSGGGGSDIQMTQSPDSLAVSLGERATINCKSSQSVLYSSNNKNYLAWYQQKPGQPPKLLIYLASTRESGVPDRFSGSGSGTDFTLTISSLQAEDVAVYYCQQYYSTWTFGQGTKVEIKRT

SEQ ID NO: 333 - protein, 218 aa, Artificial Sequence
  Description of Artificial Sequence: Synthetic polypeptide
  BIIB-C06 Fab, Fab-HC
EVQLLESGGGLVQPGGSLRLSCAASGFTFSIYRMQWVRQAPGKGLEWVSGISPSGGTTWYADSVKGRFTISRDNSKNTLYLQMNSLRAEDTAVYYCARWSGGSGYAFDIWGQGTMVTVSSASTKGPSVFPLAPSSKSTSGGTAALGCLVKDYFPEPVTVSWNSGALTSGVHTFPAVLQSSGLYSLSSVVTVPSSSLGTQTYICNVNHKPSNTKVDKKV

SEQ ID NO: 334 - protein, 214 aa, Artificial Sequence
  Description of Artificial Sequence: Synthetic polypeptide
  BIIB-C06 Fab, Fab-LC
DIQMTQSPLSLSASVGDRVTITCQASRDIRNYLNWYQQKPGKAPKLLIYDASSLQTGVPSRFGGSGSGTDFSFTIGSLQPEDIATYYCQQFDSLPHTFGQGTKLEIKRTVAAPSVFIFPPSDEQLKSGTASVVCLLNNFYPREAKVQWKVDNALQSGNSQESVTEQDSKDSTYSLSSTLTLSKADYEKHKVYACEVTHQGLSSPVTKSFNRGEC

SEQ ID NO: 335 - protein, 252 aa, Artificial Sequence
  Description of Artificial Sequence: Synthetic polypeptide
  BIIB-C06 scFv
EVQLLESGGGLVQPGGSLRLSCAASGFTFSIYRMQWVRQAPGKGLEWVSGISPSGGTTWYADSVKGRFTISRDNSKNTLYLQMNSLRAEDTAVYYCARWSGGSGYAFDIWGQGTMVTVSSASTGGGGSGGGGSGGGGSGGGGSDIQMTQSPLSLSASVGDRVTITCQASRDIRNYLNWYQQKPGKAPKLLIYDASSLQTGVPSRFGGSGSGTDFSFTIGSLQPEDIATYYCQQFDSLPHTFGQGTKLEIKRT

SEQ ID NO: 336 - protein, 215 aa, Artificial Sequence
  Description of Artificial Sequence: Synthetic polypeptide
  AMG-888 (U3) Fab, Fab-HC
QVQLQQWGAGLLKPSETLSLTCAVYGGSFSGYYWSWIRQPPGKGLEWIGEINHSGSTNYNPSLKSRVTISVETSKNQFSLKLSSVTAADTAVYYCARDKWTWYFDLWGRGTLVTVSSASTKGPSVFPLAPSSKSTSGGTAALGCLVKDYFPEPVTVSWNSGALTSGVHTFPAVLQSSGLYSLSSVVTVPSSSLGTQTYICNVNHKPSNTKVDKKV

SEQ ID NO: 337 - protein, 220 aa, Artificial Sequence
  Description of Artificial Sequence: Synthetic polypeptide
  AMG-888 (U3) Fab, Fab-LC
DIEMTQSPDSLAVSLGERATINCRSSQSVLYSSSNRNYLAWYQQNPGQPPKLLIYWASTRESGVPDRFSGSGSGTDFTLTISSLQAEDVAVYYCQQYYSTPRTFGQGTKVEIKRTVAAPSVFIFPPSDEQLKSGTASVVCLLNNFYPREAKVQWKVDNALQSGNSQESVTEQDSKDSTYSLSSTLTLSKADYEKHKVYACEVTHQGLSSPVTKSFNRGEC

SEQ ID NO: 338 - protein, 255 aa, Artificial Sequence
  Description of Artificial Sequence: Synthetic polypeptide
  AMG-888 (U3) scFv
QVQLQQWGAGLLKPSETLSLTCAVYGGSFSGYYWSWIRQPPGKGLEWIGEINHSGSTNYNPSLKSRVTISVETSKNQFSLKLSSVTAADTAVYYCARDKWTWYFDLWGRGTLVTVSSASTGGGGSGGGGSGGGGSGGGGSDIEMTQSPDSLAVSLGERATINCRSSQSVLYSSSNRNYLAWYQQNPGQPPKLLIYWASTRESGVPDRFSGSGSGTDFTLTISSLQAEDVAVYYCQQYYSTPRTFGQGTKVEIKRT

SEQ ID NO: 339 - protein, 216 aa, Artificial Sequence
  Description of Artificial Sequence: Synthetic polypeptide
  H3 Fab, Fab-HC
QVQLQESGGGLVKPGGSLRLSCAASGFTFSSYWMSWVRQAPGKGLEWVANINRDGSASYYVDSVKGRFTISRDDAKNSLYLQMNSLRAEDTAVYYCARDRGVGYFDLWGRGTLVTVSSASTKGPSVFPLAPSSKSTSGGTAALGCLVKDYFPEPVTVSWNSGALTSGVHTFPAVLQSSGLYSLSSVVTVPSSSLGTQTYICNVNHKPSNTKVDKKV

SEQ ID NO: 340 - protein, 217 aa, Artificial Sequence
  Description of Artificial Sequence: Synthetic polypeptide
  H3 Fab, Fab-LC
QSALTQPASVSGSPGQSITISCTGTSSDVGGYNFVSWYQQHPGKAPKLMIYDVSDRPSGVSDRFSGSKSGNTASLIISGLQADDEADYYCSSYGSSSTHVIFGGGTKVTVLGQPKAAPSVTLFPPSSEELQANKATLVCLISDFYPGAVTVAWKADSSPVKAGVETTTPSKQSNNKYAASSYLSLTPEQWKSHRSYSCQVTHEGSTVEKTVAPAECS

SEQ ID NO: 341 - protein, 253 aa, Artificial Sequence
  Description of Artificial Sequence: Synthetic polypeptide
  H3 scFv
QVQLQESGGGLVKPGGSLRLSCAASGFTFSSYWMSWVRQAPGKGLEWVANINRDGSASYYVDSVKGRFTISRDDAKNSLYLQMNSLRAEDTAVYYCARDRGVGYFDLWGRGTLVTVSSASTGGGGSGGGGSGGGGSGGGGSQSALTQPASVSGSPGQSITISCTGTSSDVGGYNFVSWYQQHPGKAPKLMIYDVSDRPSGVSDRFSGSKSGNTASLIISGLQADDEADYYCSSYGSSSTHVIFGGGTKVTVLG

SEQ ID NO: 342 - protein, 216 aa, Artificial Sequence
  Description of Artificial Sequence: Synthetic polypeptide
  MM AB#3 Fab, Fab-HC
EVQLLESGGGLVQPGGSLRLSCAASGFTFSAYNMRWVRQAPGKGLEWVSVIYPSGGATRYADSVKGRFTISRDNSKNTLYLQMNSLRAEDTAVYYCARGYYYYGMDVWGQGTLVTVSSASTKGPSVFPLAPSSKSTSGGTAALGCLVKDYFPEPVTVSWNSGALTSGVHTFPAVLQSSGLYSLSSVVTVPSSSLGTQTYICNVNHKPSNTKVDKKV

SEQ ID NO: 343 - protein, 216 aa, Artificial Sequence
  Description of Artificial Sequence: Synthetic polypeptide
  MM AB#3 Fab, Fab-LC
QSVLTQPPSASGTPGQRVTISCSGSDSNIGRNYIYWYQQFPGTAPKLLIYRNNQRPSGVPDRISGSKSGTSASLAISGLRSEDEAEYHCGTWDDSLSGPVFGGGTKLTVLGQPKAAPSVTLFPPSSEELQANKATLVCLISDFYPGAVTVAWKADSSPVKAGVETTTPSKQSNNKYAASSYLSLTPEQWKSHRSYSCQVTHEGSTVEKTVAPAECS

SEQ ID NO: 344 - protein, 252 aa, Artificial Sequence
  Description of Artificial Sequence: Synthetic polypeptide
  MM AB#3 scFv
EVQLLESGGGLVQPGGSLRLSCAASGFTFSAYNMRWVRQAPGKGLEWVSVIYPSGGATRYADSVKGRFTISRDNSKNTLYLQMNSLRAEDTAVYYCARGYYYYGMDVWGQGTLVTVSSASTGGGGSGGGGSGGGGSGGGGSQSVLTQPPSASGTPGQRVTISCSGSDSNIGRNYIYWYQQFPGTAPKLLIYRNNQRPSGVPDRISGSKSGTSASLAISGLRSEDEAEYHCGTWDDSLSGPVFGGGTKLTVLG

SEQ ID NO: 345 - protein, 220 aa, Artificial Sequence
  Description of Artificial Sequence: Synthetic polypeptide
  MM AB#14 Fab, Fab-HC
EVQLLESGGGLVQPGGSLRLSCAASGFTFSAYGMGWVRQAPGKGLEWVSYISPSGGHTKYADSVKGRFTISRDNSKNTLYLQMNSLRAEDTAVYYCAKVLETGLLVDAFDIWGQGTMVTVSSASTKGPSVFPLAPSSKSTSGGTAALGCLVKDYFPEPVTVSWNSGALTSGVHTFPAVLQSSGLYSLSSVVTVPSSSLGTQTYICNVNHKPSNTKVDKKV

SEQ ID NO: 346 - protein, 212 aa, Artificial Sequence
  Description of Artificial Sequence: Synthetic polypeptide
  MM AB#14 Fab, Fab-LC
QYELTQPPSVSVYPGQTASITCSGDQLGSKFVSWYQQRPGQSPVLVMYKDKRRPSEIPERFSGSNSGNTATLTISGTQAIDEADYYCQAWDSSTYVFGTGTKVTVLGQPKAAPSVTLFPPSSEELQANKATLVCLISDFYPGAVTVAWKADSSPVKAGVETTTPSKQSNNKYAASSYLSLTPEQWKSHRSYSCQVTHEGSTVEKTVAPAECS

SEQ ID NO: 347 - protein, 252 aa, Artificial Sequence
  Description of Artificial Sequence: Synthetic polypeptide
  MM AB#14 scFv
EVQLLESGGGLVQPGGSLRLSCAASGFTFSAYGMGWVRQAPGKGLEWVSYISPSGGHTKYADSVKGRFTISRDNSKNTLYLQMNSLRAEDTAVYYCAKVLETGLLVDAFDIWGQGTMVTVSSASTGGGGSGGGGSGGGGSGGGGSQYELTQPPSVSVYPGQTASITCSGDQLGSKFVSWYQQRPGQSPVLVMYKDKRRPSEIPERFSGSNSGNTATLTISGTQAIDEADYYCQAWDSSTYVFGTGTKVTVLG

SEQ ID NO: 348 - protein, 216 aa, Artificial Sequence
  Description of Artificial Sequence: Synthetic polypeptide
  MM AB#17 Fab, Fab-HC
EVQLLESGGGLVQPGGSLRLSCAASGFTFSWYGMGWVRQAPGKGLEWVSYISPSGGITVYADSVKGRFTISRDNSKNTLYLQMNSLRAEDTAVYYCARLNYYYGLDVWGQGTTVTVSSASTKGPSVFPLAPSSKSTSGGTAALGCLVKDYFPEPVTVSWNSGALTSGVHTFPAVLQSSGLYSLSSVVTVPSSSLGTQTYICNVNHKPSNTKVDKKV

SEQ ID NO: 349 - protein, 214 aa, Artificial Sequence
  Description of Artificial Sequence: Synthetic polypeptide
  MM AB#17 Fab, Fab-LC
DIQMTQSPSSLSASVGDRITITCQASQDIGDSLNWYQQKPGKAPRLLIYDASNLETGVPPRFSGSGSGTDFTFTFRSLQPEDIATYFCQQSANAPFTFGPGTKVDIKRTVAAPSVFIFPPSDEQLKSGTASVVCLLNNFYPREAKVQWKVDNALQSGNSQESVTEQDSKDSTYSLSSTLTLSKADYEKHKVYACEVTHQGLSSPVTKSFNRGEC

SEQ ID NO: 350 - protein, 250 aa, Artificial Sequence
  Description of Artificial Sequence: Synthetic polypeptide
  MM AB#17 scFv
EVQLLESGGGLVQPGGSLRLSCAASGFTFSWYGMGWVRQAPGKGLEWVSYISPSGGITVYADSVKGRFTISRDNSKNTLYLQMNSLRAEDTAVYYCARLNYYYGLDVWGQGTTVTVSSASTGGGGSGGGGSGGGGSGGGGSDIQMTQSPSSLSASVGDRITITCQASQDIGDSLNWYQQKPGKAPRLLIYDASNLETGVPPRFSGSGSGTDFTFTFRSLQPEDIATYFCQQSANAPFTFGPGTKVDIKRT

SEQ ID NO: 351 - protein, 217 aa, Artificial Sequence
  Description of Artificial Sequence: Synthetic polypeptide
  MM AB#19 Fab, Fab-HC
EVQLLESGGGLVQPGGSLRLSCAASGFTFSRYGMWWVRQAPGKGLEWVSYIGSSGGPTYYVDSVKGRFTISRDNSKNTLYLQMNSLRAEDTAVYYCAGGRGTPYYFDSWGQGTLVTVSSASTKGPSVFPLAPSSKSTSGGTAALGCLVKDYFPEPVTVSWNSGALTSGVHTFPAVLQSSGLYSLSSVVTVPSSSLGTQTYICNVNHKPSNTKVDKKV

SEQ ID NO: 352 - protein, 216 aa, Artificial Sequence
  Description of Artificial Sequence: Synthetic polypeptide
  MM AB#19 Fab, Fab-LC
QYELTQPASVSGSPGQSITISCTGTSSDIGRWNIVSWYQQHPGKAPKLMIYDVSNRPSGVSNRFSGSKSGNTASLTISGLQAEDEADYYCSSYTSSSTWVFGGGTKLTVLGQPKAAPSVTLFPPSSEELQANKATLVCLISDFYPGAVTVAWKADSSPVKAGVETTTPSKQSNNKYAASSYLSLTPEQWKSHRSYSCQVTHEGSTVEKTVAPAECS

SEQ ID NO: 353 - protein, 253 aa, Artificial Sequence
  Description of Artificial Sequence: Synthetic polypeptide
  MM AB#19 scFv
EVQLLESGGGLVQPGGSLRLSCAASGFTFSRYGMWWVRQAPGKGLEWVSYIGSSGGPTYYVDSVKGRFTISRDNSKNTLYLQMNSLRAEDTAVYYCAGGRGTPYYFDSWGQGTLVTVSSASTGGGGSGGGGSGGGGSGGGGSQYELTQPASVSGSPGQSITISCTGTSSDIGRWNIVSWYQQHPGKAPKLMIYDVSNRPSGVSNRFSGSKSGNTASLTISGLQAEDEADYYCSSYTSSSTWVFGGGTKLTVLG

SEQ ID NO: 354 - DNA, 2154 bp, Artificial Sequence
  Description of Artificial Sequence: Synthetic polynucleotide
  B60-G2-M78 (IgG2 backbone)
gaggtccagctcgtcgagtcaggtggaggactggtgcaacccggtcgatcacttcggctgtcgtgtgcggcatcgggattcacgtttgacgattatgccatgcattgggtgcgacaagctccgggcaaagggcttgaatgggtgtccggaatctcgtgggattcggggtcagtgggctatgccgattccgtaaagggtaggttcaccatctcacgcgacaatgcgaagaattcgttgtatcttcagatgaattcgcttagggcagaagatacggccttgtactattgcgcaagggaccttggggcgtaccagtgggaggagggtttcgattactggggtcagggaaccctggtaacggtgtcgagcgctagcactaagggaccgtccgtgtttcccctcgcgccttgcagccgctcgacgagcgaatcgacagcggcgctcggctgtctcgtcaaagactacttccccgagccggtgaccgtgagctggaattccggagcgttgacctcaggggtgcatacattccctgccgtactgcaatcatcagggctctactcattgtcgagcgtagtgactgtaccgtcgtcaaacttcggaacgcagacgtacacatgtaatgtcgatcacaagccctccaatactaaggtagataagaccgtagaacgaaagtgttgtgtcgaatgccctccgtgccccgcaccaccggtcgcgggtccatcagtctttctgttcccgccaaagcccaaagacacactgatgatttcgcgcacgcccgaagtcacttgcgtcgtggtggatgtgtcgcatgaggacccggaggtccaattcaactggtacgtcgatggtgtagaagtccacaacgccaagaccaagcctcgggaggagcagttcaactccacctttcgggtagtgagcgtgcttacagtagtgcatcaggactggctgaacggcaaagaatacaaatgcaaagtcagcaacaaaggactgccagcgcccatcgagaaaacaattagcaaaactaaagggcagcccagagaacctcaagtgtatacattgccgccgtcgcgggaggaaatgacaaagaatcaggtatccctgacgtgtcttgtgaaaggcttttacccatccgacattgcggtagagtgggagtcgaatgggcaacccgagaacaactataagacgactcccccaatgttggattcagacggatcctttttcttgtactcgaaactcacagtcgacaagtccagatggcagcaggggaacgtgttcagctgcagcgtgatgcacgaggcccttcacaaccactatacgcagaaatcattaagcttatcgcccggaggaggtgggggttccgggggtgggggatccggtggaggagggtccgaggtccaactgctgcagtccggcggagggctcgtgcagcctggcggtagcctgagactttcgtgtgcggccagcgggtttgacttttcatcatatcccatgcactgggtgagacaagctccggggaaaggtcttgaatgggtcggctccatttcgtcatcgggtggtgcgaccccgtacgccgattcggtgaagggacgattcaccatctcgcgggataactcgaagaacactctttatctccagatgaattcgctgaggcccgaagatacggcagtgtattactgtgcgaaagacttctatacgattttgactggcaatgcattcgacatgtggggccagggaacgtcggtaacagtctcaagcgcatcaacaggtggtggagggtcgggaggaggaggaagcggtgggggagggtcagggggaggcggatcggacatccagatgacccagtccccttcctcgctctccgcgtccttgggtgaccgcgtaacgatcacatgcagagcaagccaaggaatttcaagctatcttgcgtggtatcagcagaagccgggtaaagcgcccaagttgttgatctacgccagctccacaaggcagtcgggggtcccctcacgcttttcggggtcgggctcgggaactgacttcaccttgacgatctccagcctccagccagaggattcagggacctactactgccaacagtactgggcgtttcccctgacattcggagggggaacaaaagtagagatcaagcggacgtgataa

SEQ ID NO: 355 - protein, 716 aa, Artificial Sequence
  Description of Artificial Sequence: Synthetic polypeptide
  B60-G2-M78 (IgG2 backbone)
EVQLVESGGGLVQPGRSLRLSCAASGFTFDDYAMHWVRQAPGKGLEWVSGISWDSGSVGYADSVKGRFTISRDNAKNSLYLQMNSLRAEDTALYYCARDLGAYQWEEGFDYWGQGTLVTVSSASTKGPSVFPLAPCSRSTSESTAALGCLVKDYFPEPVTVSWNSGALTSGVHTFPAVLQSSGLYSLSSVVTVPSSNFGTQTYTCNVDHKPSNTKVDKTVERKCCVECPPCPAPPVAGPSVFLFPPKPKDTLMISRTPEVTCVVVDVSHEDPEVQFNWYVDGVEVHNAKTKPREEQFNSTFRVVSVLTVVHQDWLNGKEYKCKVSNKGLPAPIEKTISKTKGQPREPQVYTLPPSREEMTKNQVSLTCLVKGFYPSDIAVEWESNGQPENNYKTTPPMLDSDGSFFLYSKLTVDKSRWQQGNVFSCSVMHEALHNHYTQKSLSLSPGGGGGSGGGGSGGGGSEVQLLQSGGGLVQPGGSLRLSCAASGFDFSSYPMHWVRQAPGKGLEWVGSISSSGGATPYADSVKGRFTISRDNSKNTLYLQMNSLRPEDTAVYYCAKDFYTILTGNAFDMWGQGTSVTVSSASTGGGGSGGGGSGGGGSGGGGSDIQMTQSPSSLSASLGDRVTITCRASQGISSYLAWYQQKPGKAPKLLIYASSTRQSGVPSRFSGSGSGTDFTLTISSLQPEDSGTYYCQQYWAFPLTFGGGTKVEIKRT

SEQ ID NO: 356 - DNA, 2154 bp, Artificial Sequence
  Description of Artificial Sequence: Synthetic polynucleotide
  M7-G2-M78 (IgG2 back bone)
gaggtccagctcgtcgagtcaggtggaggactggtgcaacccggtcgatcacttcggctgtcgtgtgcggcatcgggattcacgtttgacgattatgccatgcattgggtgcgacaagctccgggcaaagggcttgaatgggtgtccggaatctcgtgggattcggggtcagtgggctatgccgattccgtaaagggtaggttcaccatctcacgcgacaatgcgaagaattcgttgtacctccaaatgaattcgcttagggcagaagatacggccttgtactattgcgcaagggaccttgggtacaaccagtggtgggaaggtttcgattactggggtcagggaaccctggtaacggtgtcgagcgctagcactaagggaccgtccgtgtttcccctcgcgccttgcagccgctcgacgagcgaatcgacagcggcgctcggctgtctcgtcaaagactacttccccgagccggtgaccgtgagctggaattccggagcgttgacctcaggggtgcatacattccctgccgtactgcaatcatcagggctctactcattgtcgagcgtagtgactgtaccgtcgtcaaacttcggaacgcagacgtacacatgtaatgtcgatcacaagccctccaatactaaggtagataagaccgtagaacgaaagtgttgtgtcgaatgccctccgtgccccgcaccaccggtcgcgggtccatcagtctttctgttcccgccaaagcccaaagacacactgatgatttcgcgcacgcccgaagtcacttgcgtcgtggtggatgtgtcgcatgaggacccggaggtccaattcaactggtacgtcgatggtgtagaagtccacaacgccaagaccaagcctcgggaggagcagttcaactccacctttcgggtagtgagcgtgcttacagtagtgcatcaggactggctgaacggcaaagaatacaaatgcaaagtcagcaacaaaggactgccagcgcccatcgagaaaacaattagcaaaactaaagggcagcccagagaacctcaagtgtatacattgccgccgtcgcgggaggaaatgacaaagaatcaggtatccctgacgtgtcttgtgaaaggcttttacccatccgacattgcggtagagtgggagtcgaatgggcaacccgagaacaactataagacgactcccccaatgttggattcagacggatcctttttcttgtactcgaaactcacagtcgacaagtccagatggcagcaggggaacgtgttcagctgcagcgtgatgcacgaggcccttcacaaccactatacgcagaaatcattaagcttatcgcccggaggaggtgggggttccgggggtgggggatccggtggaggagggtccgaggtccaactgctgcagtccggcggagggctcgtgcagcctggcggtagcctgagactttcgtgtgcggccagcgggtttgacttttcatcatatcccatgcactgggtgagacaagctccggggaaaggtcttgaatgggtcggctccatttcgtcatcgggtggtgcgaccccgtacgccgattcggtgaagggacgattcaccatctcgcgggataactcgaagaacactctttatctccagatgaattcgctgaggcccgaagatacggcagtgtattactgtgcgaaagacttctatacgattttgactggcaatgcattcgacatgtggggccagggaacgtcggtaacagtctcaagcgcatcaacaggtggtggagggtcgggaggaggaggaagcggtgggggagggtcagggggaggcggatcggacatccagatgacccagtccccttcctcgctctccgcgtccttgggtgaccgcgtaacgatcacatgcagagcaagccaaggaatttcaagctatcttgcgtggtatcagcagaagccgggtaaagcgcccaagttgttgatctacgccagctccacaaggcagtcgggggtcccctcacgcttttcggggtcgggctcgggaactgacttcaccttgacgatctccagcctccagccagaggattcagggacctactactgccaacagtactgggcgtttcccctgacattcggagggggaacaaaagtagagatcaagcggacgtgataa

SEQ ID NO: 357 - protein, 716 aa, Artificial Sequence
  Description of Artificial Sequence: Synthetic polypeptide
  M7-G2-M78 (IgG2 back bone)
EVQLVESGGGLVQPGRSLRLSCAASGFTFDDYAMHWVRQAPGKGLEWVSGISWDSGSVGYADSVKGRFTISRDNAKNSLYLQMNSLRAEDTALYYCARDLGYNQWWEGFDYWGQGTLVTVSSASTKGPSVFPLAPCSRSTSESTAALGCLVKDYFPEPVTVSWNSGALTSGVHTFPAVLQSSGLYSLSSVVTVPSSNFGTQTYTCNVDHKPSNTKVDKTVERKCCVECPPCPAPPVAGPSVFLFPPKPKDTLMISRTPEVTCVVVDVSHEDPEVQFNWYVDGVEVHNAKTKPREEQFNSTFRVVSVLTVVHQDWLNGKEYKCKVSNKGLPAPIEKTISKTKGQPREPQVYTLPPSREEMTKNQVSLTCLVKGFYPSDIAVEWESNGQPENNYKTTPPMLDSDGSFFLYSKLTVDKSRWQQGNVFSCSVMHEALHNHYTQKSLSLSPGGGGGSGGGGSGGGGSEVQLLQSGGGLVQPGGSLRLSCAASGFDFSSYPMHWVRQAPGKGLEWVGSISSSGGATPYADSVKGRFTISRDNSKNTLYLQMNSLRPEDTAVYYCAKDFYTILTGNAFDMWGQGTSVTVSSASTGGGGSGGGGSGGGGSGGGGSDIQMTQSPSSLSASLGDRVTITCRASQGISSYLAWYQQKPGKAPKLLIYASSTRQSGVPSRFSGSGSGTDFTLTISSLQPEDSGTYYCQQYWAFPLTFGGGTKVEIKRT

SEQ ID NO: 358-375 - skipped (18 entries)

SEQ ID NO: 376 - protein, 720 aa, Artificial Sequence
  Description of Artificial Sequence: Synthetic polypeptide
  P4M-G1-M1.3 HC
EVQLLQSGGGLVQPGGSLRLSCAASGFMFSRYPMHWVRQAPGKGLEWVSSISGSGGATPYADSVKGRFTISRDNSKNTLYLQMNSLRAEDTAVYYCAKDFYQILTGNAFDYWGQGTTVTVSSASTKGPSVFPLAPSSKSTSGGTAALGCLVKDYFPEPVTVSWNSGALTSGVHTFPAVLQSSGLYSLSSVVTVPSSSLGTQTYICNVNHKPSNTKVDKKVEPKSCDKTHTCPPCPAPELLGGPSVFLFPPKPKDTLMISRTPEVTCVVVDVSHEDPEVKFNWYVDGVEVHNAKTKPREEQYNSTYRVVSVLTVLHQDWLNGKEYKCKVSNKALPAPIEKTISKAKGQPREPQVYTLPPSREEMTKNQVSLTCLVKGFYPSDIAVEWESNGQPENNYKTTPPVLDSDGSFFLYSKLTVDKSRWQQGNVFSCSVMHEALHNHYTQKSLSLSPGGGGGSGGGGSGGGGSQVQLVQSGGGLVQPGGSLRLSCAASGFTFDDYAMHWVRQAPGKGLEWVAGISWDSGSTGYADSVKGRFTISRDNAKNSLYLQMNSLRAEDTALYYCARDLGAYQWVEGFDYWGQGTLVTVSSASTGGGGSGGGGSGGGGSGGGGSSYELTQDPAVSVALGQTVRITCQGDSLRSYYASWYQQKPGQAPVLVIYGKNNRPSGIPDRFSGSTSGNSASLTITGAQAEDEADYYCNSRDSPGNQWVFGGGTKVTVLG

SEQ ID NO: 377 - protein, 720 aa, Artificial Sequence
  Description of Artificial Sequence: Synthetic polypeptide
  P4M -G1-C8 HC
EVQLLQSGGGLVQPGGSLRLSCAASGFMFSRYPMHWVRQAPGKGLEWVSSISGSGGATPYADSVKGRFTISRDNSKNTLYLQMNSLRAEDTAVYYCAKDFYQILTGNAFDYWGQGTTVTVSSASTKGPSVFPLAPSSKSTSGGTAALGCLVKDYFPEPVTVSWNSGALTSGVHTFPAVLQSSGLYSLSSVVTVPSSSLGTQTYICNVNHKPSNTKVDKKVEPKSCDKTHTCPPCPAPELLGGPSVFLFPPKPKDTLMISRTPEVTCVVVDVSHEDPEVKFNWYVDGVEVHNAKTKPREEQYNSTYRVVSVLTVLHQDWLNGKEYKCKVSNKALPAPIEKTISKAKGQPREPQVYTLPPSREEMTKNQVSLTCLVKGFYPSDIAVEWESNGQPENNYKTTPPVLDSDGSFFLYSKLTVDKSRWQQGNVFSCSVMHEALHNHYTQKSLSLSPGGGGGSGGGGSGGGGSQVQLVQSGGGLVQPGGSLRLSCAASGFTFDDYAMHWVRQAPGKGLEWVAGISWNSGSIGYADSVKGRFTISRDNAKNSLYLQMNSLRPEDTAVYYCARDLGYNQWVEGFDYWGQGTLVTVSSASTGGGGSGGGGSGGGGSGGGGSSYELTQDPAVSVALGQTVRITCQGDSLRSYYASWYQQKPGQAPVLVIYGKNNRPSGIPDRFSGSTSGNSASLTITGAQAEDEADYYCNSRDSSGNHWVFGGGTKVTVLG

SEQ ID NO: 378 - protein, 720 aa, Artificial Sequence
  Description of Artificial Sequence: Synthetic polypeptide
  P33M-G1-M1.3 HC
EVQLLQSGGGLVQPGGSLRLSCAASGFFFSKYPMHWVRQAPGKGLEWVSSISSDGGATVYADSVKGRFTISRDNSKNTLYLQMNSLRAEDTAVYYCAKDFYTILTGNAFDTWGQGTTVTVSSASTKGPSVFPLAPSSKSTSGGTAALGCLVKDYFPEPVTVSWNSGALTSGVHTFPAVLQSSGLYSLSSVVTVPSSSLGTQTYICNVNHKPSNTKVDKKVEPKSCDKTHTCPPCPAPELLGGPSVFLFPPKPKDTLMISRTPEVTCVVVDVSHEDPEVKFNWYVDGVEVHNAKTKPREEQYNSTYRVVSVLTVLHQDWLNGKEYKCKVSNKALPAPIEKTISKAKGQPREPQVYTLPPSREEMTKNQVSLTCLVKGFYPSDIAVEWESNGQPENNYKTTPPVLDSDGSFFLYSKLTVDKSRWQQGNVFSCSVMHEALHNHYTQKSLSLSPGGGGGSGGGGSGGGGSQVQLVQSGGGLVQPGGSLRLSCAASGFTFDDYAMHWVRQAPGKGLEWVAGISWDSGSTGYADSVKGRFTISRDNAKNSLYLQMNSLRAEDTALYYCARDLGAYQWVEGFDYWGQGTLVTVSSASTGGGGSGGGGSGGGGSGGGGSSYELTQDPAVSVALGQTVRITCQGDSLRSYYASWYQQKPGQAPVLVIYGKNNRPSGIPDRFSGSTSGNSASLTITGAQAEDEADYYCNSRDSPGNQWVFGGGTKVTVLG

SEQ ID NO: 379 - protein, 720 aa, Artificial Sequence
  Description of Artificial Sequence: Synthetic polypeptide
  P33M -G1-C8 HC
EVQLLQSGGGLVQPGGSLRLSCAASGFFFSKYPMHWVRQAPGKGLEWVSSISSDGGATVYADSVKGRFTISRDNSKNTLYLQMNSLRAEDTAVYYCAKDFYTILTGNAFDTWGQGTTVTVSSASTKGPSVFPLAPSSKSTSGGTAALGCLVKDYFPEPVTVSWNSGALTSGVHTFPAVLQSSGLYSLSSVVTVPSSSLGTQTYICNVNHKPSNTKVDKKVEPKSCDKTHTCPPCPAPELLGGPSVFLFPPKPKDTLMISRTPEVTCVVVDVSHEDPEVKFNWYVDGVEVHNAKTKPREEQYNSTYRVVSVLTVLHQDWLNGKEYKCKVSNKALPAPIEKTISKAKGQPREPQVYTLPPSREEMTKNQVSLTCLVKGFYPSDIAVEWESNGQPENNYKTTPPVLDSDGSFFLYSKLTVDKSRWQQGNVFSCSVMHEALHNHYTQKSLSLSPGGGGGSGGGGSGGGGSQVQLVQSGGGLVQPGGSLRLSCAASGFTFDDYAMHWVRQAPGKGLEWVAGISWNSGSIGYADSVKGRFTISRDNAKNSLYLQMNSLRPEDTAVYYCARDLGYNQWVEGFDYWGQGTLVTVSSASTGGGGSGGGGSGGGGSGGGGSSYELTQDPAVSVALGQTVRITCQGDSLRSYYASWYQQKPGQAPVLVIYGKNNRPSGIPDRFSGSTSGNSASLTITGAQAEDEADYYCNSRDSSGNHWVFGGGTKVTVLG

SEQ ID NO: 380 - protein, 214 aa, Artificial Sequence
  Description of Artificial Sequence: Synthetic polypeptide
  P33M KAPPA LIGHT CHAIN
DIQMTQSPSSLSASTGDRVTITCRASQGISSYLAWYQQKPGKAPKLLIYARSTRQSGVPSRFSGSGSGTDFTLTISSLQPEDFATYYCQQYWRWPLTFGGGTKVEIKRTVAAPSVFIFPPSDEQLKSGTASVVCLLNNFYPREAKVQWKVDNALQSGNSQESVTEQDSKDSTYSLSSTLTLSKADYEKHKVYACEVTHQGLSSPVTKSFNRGEC

SEQ ID NO: 381 - protein, 214 aa, Artificial Sequence
  Description of Artificial Sequence: Synthetic polypeptide
  P4M KAPPA LIGHT CHAIN
DIQMTQSPSSLSASTGDRVTITCRASQGISSYLAWYQQKPGKAPKLLIYAKSTLQSGVPSRFSGSGSGTDFTLTISSLQPEDFATYYCQQYWTFPLTFGGGTKVEIKRTVAAPSVFIFPPSDEQLKSGTASVVCLLNNFYPREAKVQWKVDNALQSGNSQESVTEQDSKDSTYSLSSTLTLSKADYEKHKVYACEVTHQGLSSPVTKSFNRGEC

SEQ ID NO: 382 - protein, 254 aa, Artificial Sequence
  Description of Artificial Sequence: Synthetic polypeptide
  Anti-IGF-1R scFvs M76
EVQLLQSGGGLVQPGGSLRLSCAASGFLFSSYPMHWVRQAPGKGLEWVGSISPSGGATPYADSVKGRFTISRDNSKNTLYLQMNSLRPEDTAVYYCAKDFYNILTGNAFDKWGQGTSVTVSSASTGGGGSGGGGSGGGGSGGGGSDIQLTQSPSSLSASLGDRVTITCRASQGISSYLAWYQQKPGKAPKLLIYAGSTPQSGVPSRFSGSGSGTEFTLTISSLQPEDSGTYYCQQYWTWPLTFGGGTKVEIKRT

SEQ ID NO: 383 - protein, 254 aa, Artificial Sequence
  Description of Artificial Sequence: Synthetic polypeptide
  Anti-ErbB3 scFvs P6L
EVQLVESGGGLVQPGRSLRLSCAASGFTFDDYAMHWVRQAPGKGLEWVSGISWNSGSTGYADSVKGRFTISRDNAKNSLYLQMNSLRAEDTALYYCARDLGYNQWLEGFDYWGQGTLVTVSSASTGGGGSGGGGSGGGGSGGGGSSSELTQDPAVSVALGQTVRITCQGDSLRSYYASWYQQKPGQAPVLVIYGKNNRPSGIPDRFSGSSSGNTASLTITGAQAEDEADYYCMSRDHPGNQWVFGGGTKVTVLG

SEQ ID NO: 384-388 - skipped (5 entries)

SEQ ID NO: 389 - protein, 720 aa, Artificial Sequence
  Description of Artificial Sequence: Synthetic polypeptide
  P4M-G1-P6L HC
EVQLLQSGGGLVQPGGSLRLSCAASGFMFSRYPMHWVRQAPGKGLEWVSSISGSGGATPYADSVKGRFTISRDNSKNTLYLQMNSLRAEDTAVYYCAKDFYQILTGNAFDYWGQGTTVTVSSASTKGPSVFPLAPSSKSTSGGTAALGCLVKDYFPEPVTVSWNSGALTSGVHTFPAVLQSSGLYSLSSVVTVPSSSLGTQTYICNVNHKPSNTKVDKKVEPKSCDKTHTCPPCPAPELLGGPSVFLFPPKPKDTLMISRTPEVTCVVVDVSHEDPEVKFNWYVDGVEVHNAKTKPREEQYNSTYRVVSVLTVLHQDWLNGKEYKCKVSNKALPAPIEKTISKAKGQPREPQVYTLPPSREEMTKNQVSLTCLVKGFYPSDIAVEWESNGQPENNYKTTPPVLDSDGSFFLYSKLTVDKSRWQQGNVFSCSVMHEALHNHYTQKSLSLSPGGGGGSGGGGSGGGGSEVQLVESGGGLVQPGRSLRLSCAASGFTFDDYAMHWVRQAPGKGLEWVSGISWNSGSTGYADSVKGRFTISRDNAKNSLYLQMNSLRAEDTALYYCARDLGYNQWLEGFDYWGQGTLVTVSSASTGGGGSGGGGSGGGGSGGGGSSSELTQDPAVSVALGQTVRITCQGDSLRSYYASWYQQKPGQAPVLVIYGKNNRPSGIPDRFSGSSSGNTASLTITGAQAEDEADYYCMSRDHPGNQWVFGGGTKVTVLG

SEQ ID NO: 390 - protein, 720 aa, Artificial Sequence
  Description of Artificial Sequence: Synthetic polypeptide
  P33M-G1-P6L HC
EVQLLQSGGGLVQPGGSLRLSCAASGFFFSKYPMHWVRQAPGKGLEWVSSISSDGGATVYADSVKGRFTISRDNSKNTLYLQMNSLRAEDTAVYYCAKDFYTILTGNAFDTWGQGTTVTVSSASTKGPSVFPLAPSSKSTSGGTAALGCLVKDYFPEPVTVSWNSGALTSGVHTFPAVLQSSGLYSLSSVVTVPSSSLGTQTYICNVNHKPSNTKVDKKVEPKSCDKTHTCPPCPAPELLGGPSVFLFPPKPKDTLMISRTPEVTCVVVDVSHEDPEVKFNWYVDGVEVHNAKTKPREEQYNSTYRVVSVLTVLHQDWLNGKEYKCKVSNKALPAPIEKTISKAKGQPREPQVYTLPPSREEMTKNQVSLTCLVKGFYPSDIAVEWESNGQPENNYKTTPPVLDSDGSFFLYSKLTVDKSRWQQGNVFSCSVMHEALHNHYTQKSLSLSPGGGGGSGGGGSGGGGSEVQLVESGGGLVQPGRSLRLSCAASGFTFDDYAMHWVRQAPGKGLEWVSGISWNSGSTGYADSVKGRFTISRDNAKNSLYLQMNSLRAEDTALYYCARDLGYNQWLEGFDYWGQGTLVTVSSASTGGGGSGGGGSGGGGSGGGGSSSELTQDPAVSVALGQTVRITCQGDSLRSYYASWYQQKPGQAPVLVIYGKNNRPSGIPDRFSGSSSGNTASLTITGAQAEDEADYYCMSRDHPGNQWVFGGGTKVTVLG

SEQ ID NO: 391 - protein, 720 aa, Artificial Sequence
  Description of Artificial Sequence: Synthetic polypeptide
  P1-G1-M76
EVQLVESGGGLVQPGRSLRLSCAASGFTFDDYAMHWVRQAPGKGLEWVSGISWDSGSTGYADSVKGRFTISRDNAKNSLYLQMNSLRAEDTALYYCARDLGAYQWVEGFDYWGQGTLVTVSSASTKGPSVFPLAPSSKSTSGGTAALGCLVKDYFPEPVTVSWNSGALTSGVHTFPAVLQSSGLYSLSSVVTVPSSSLGTQTYICNVNHKPSNTKVDKKVEPKSCDKTHTCPPCPAPELLGGPSVFLFPPKPKDTLMISRTPEVTCVVVDVSHEDPEVKFNWYVDGVEVHNAKTKPREEQYNSTYRVVSVLTVLHQDWLNGKEYKCKVSNKALPAPIEKTISKAKGQPREPQVYTLPPSREEMTKNQVSLTCLVKGFYPSDIAVEWESNGQPENNYKTTPPVLDSDGSFFLYSKLTVDKSRWQQGNVFSCSVMHEALHNHYTQKSLSLSPGGGGGSGGGGSGGGGSEVQLLQSGGGLVQPGGSLRLSCAASGFLFSSYPMHWVRQAPGKGLEWVGSISPSGGATPYADSVKGRFTISRDNSKNTLYLQMNSLRPEDTAVYYCAKDFYNILTGNAFDKWGQGTSVTVSSASTGGGGSGGGGSGGGGSGGGGSDIQLTQSPSSLSASLGDRVTITCRASQGISSYLAWYQQKPGKAPKLLIYAGSTPQSGVPSRFSGSGSGTEFTLTISSLQPEDSGTYYCQQYWTWPLTFGGGTKVEIKRT

SEQ ID NO: 392 - protein, 324 aa, Artificial Sequence
  Description of Artificial Sequence: Synthetic polypeptide
  IgG2 constant domain (including CH1, hinge, CH2 and CH3)
ASTKGPSVFPLAPCSRSTSESTAALGCLVKDYFPEPVTVSWNSGALTSGVHTFPAVLQSSGLYSLSSVVTVPSSNFGTQTYTCNVDHKPSNTKVDKTVERKCCVECPPCPAPPVAGPSVFLFPPKPKDTLMISRTPEVTCVVVDVSHEDPEVQFNWYVDGVEVHNAKTKPREEQFNSTFRVVSVLTVVHQDWLNGKEYKCKVSNKGLPAPIEKTISKTKGQPREPQVYTLPPSREEMTKNQVSLTCLVKGFYPSDIAVEWESNGQPENNYKTTPPMLDSDGSFFLYSKLTVDKSRWQQGNVFSCSVMHEALHNHYTQKSLSLSP

SEQ ID NO: 393 - protein, 734 aa, Artificial Sequence
  Description of Artificial Sequence: Synthetic polypeptide
  SF-G1-P1
MGFGLSWLFLVAILKGVQCEVQLLQSGGGLVQPGGSLRLSCAASGFTFSVYPMHWVRQAPGKGLEWVSSISSSGGATRYADSVKGRFTISRDNSKNTLYLQMNSLRAEDTAVYYCAKDFYDILTGNAFDIWGQGTTVTVSSASTKGPSVFPLAPSSKSTSGGTAALGCLVKDYFPEPVTVSWNSGALTSGVHTFPAVLQSSGLYSLSSVVTVPSSSLGTQTYICNVNHKPSNTKVDKKVEPKSCDKTHTCPPCPAPELLGGPSVFLFPPKPKDTLMISRTPEVTCVVVDVSHEDPEVKFNWYVDGVEVHNAKTKPREEQYNSTYRVVSVLTVLHQDWLNGKEYKCKVSNKALPAPIEKTISKAKGQPREPQVYTLPPSREEMTKNQVSLTCLVKGFYPSDIAVEWESNGQPENNYKTTPPVLDSDGSFFLYSKLTVDKSRWQQGNVFSCSVMHEALHNHYTQKSLSLSPGGGGGSGGGGSGGGGSEVQLVESGGGLVQPGRSLRLSCAASGFTFDDYAMHWVRQAPGKGLEWVSGISWDSGSTGYADSVKGRFTISRDNAKNSLYLQMNSLRAEDTALYYCARDLGAYQWVEGFDYWGQGTLVTVSSASTGGGGSGGGGSGGGGSSSELTQDPAVSVALGQTVRITCQGDSLRSYYASWYQQKPGQAPVLVIYGKNNRPSGIPDRFSGSSSGNTASLTITGAQAEDEADYYCESRDSPGNQWVFGGGTKVTVLG

SEQ ID NO: 394 - protein, 734 aa, Artificial Sequence
  Description of Artificial Sequence: Synthetic polypeptide
  SF-G1-M27
MGFGLSWLFLVAILKGVQCEVQLLQSGGGLVQPGGSLRLSCAASGFTFSVYPMHWVRQAPGKGLEWVSSISSSGGATRYADSVKGRFTISRDNSKNTLYLQMNSLRAEDTAVYYCAKDFYDILTGNAFDIWGQGTTVTVSSASTKGPSVFPLAPSSKSTSGGTAALGCLVKDYFPEPVTVSWNSGALTSGVHTFPAVLQSSGLYSLSSVVTVPSSSLGTQTYICNVNHKPSNTKVDKKVEPKSCDKTHTCPPCPAPELLGGPSVFLFPPKPKDTLMISRTPEVTCVVVDVSHEDPEVKFNWYVDGVEVHNAKTKPREEQYNSTYRVVSVLTVLHQDWLNGKEYKCKVSNKALPAPIEKTISKAKGQPREPQVYTLPPSREEMTKNQVSLTCLVKGFYPSDIAVEWESNGQPENNYKTTPPVLDSDGSFFLYSKLTVDKSRWQQGNVFSCSVMHEALHNHYTQKSLSLSPGGGGGSGGGGSGGGGSEVQLVESGGGLVQPGRSLRLSCAASGFTFDDYAMHWVRQAPGKGLEWVSGISWNSGSTGYADSVKGRFTISRDNAKNSLYLQMNSLRAEDTALYYCARDLGFNQWVDGFDYWGQGTLVTVSSASTGGGGSGGGGSGGGGSSSELTQDPAVSVALGQTVRITCQGDSLRSYYASWYQQKPGQAPVLVIYGKNNRPSGIPDRFSGSSSGNTASLTITGAQAEDEADYYCNSRDTPGDQWVFGGGTKVTVLG

SEQ ID NO: 395 - protein, 739 aa, Artificial Sequence
  Description of Artificial Sequence: Synthetic polypeptide
  M57 -G1-C8
MGFGLSWLFLVAILKGVQCEVQLLQSGGGLVQPGGSLRLSCAASGFFFSKYPMHWVRQAPGKGLEWVSSISSDGGATVYADSVKGRFTISRDNSKNTLYLQMNSLRAEDTAVYYCAKDFYTWLTGNAFDSWGQGTSVTVSSASTKGPSVFPLAPSSKSTSGGTAALGCLVKDYFPEPVTVSWNSGALTSGVHTFPAVLQSSGLYSLSSVVTVPSSSLGTQTYICNVNHKPSNTKVDKKVEPKSCDKTHTCPPCPAPELLGGPSVFLFPPKPKDTLMISRTPEVTCVVVDVSHEDPEVKFNWYVDGVEVHNAKTKPREEQYNSTYRVVSVLTVLHQDWLNGKEYKCKVSNKALPAPIEKTISKAKGQPREPQVYTLPPSREEMTKNQVSLTCLVKGFYPSDIAVEWESNGQPENNYKTTPPVLDSDGSFFLYSKLTVDKSRWQQGNVFSCSVMHEALHNHYTQKSLSLSPGGGGGSGGGGSGGGGSQVQLVQSGGGLVQPGGSLRLSCAASGFTFDDYAMHWVRQAPGKGLEWVAGISWNSGSIGYADSVKGRFTISRDNAKNSLYLQMNSLRPEDTAVYYCARDLGYNQWVEGFDYWGQGTLVTVSSASTGGGGSGGGGSGGGGSGGGGSSYELTQDPAVSVALGQTVRITCQGDSLRSYYASWYQQKPGQAPVLVIYGKNNRPSGIPDRFSGSTSGNSASLTITGAQAEDEADYYCNSRDSSGNHWVFGGGTKVTVLG

SEQ ID NO: 396 - protein, 739 aa, Artificial Sequence
  Description of Artificial Sequence: Synthetic polypeptide
  M7-G1-M78 HC
MGFGLSWLFLVAILKGVQCEVQLVESGGGLVQPGRSLRLSCAASGFTFDDYAMHWVRQAPGKGLEWVSGISWDSGSVGYADSVKGRFTISRDNAKNSLYLQMNSLRAEDTALYYCARDLGYNQWWEGFDYWGQGTLVTVSSASTKGPSVFPLAPSSKSTSGGTAALGCLVKDYFPEPVTVSWNSGALTSGVHTFPAVLQSSGLYSLSSVVTVPSSSLGTQTYICNVNHKPSNTKVDKKVEPKSCDKTHTCPPCPAPELLGGPSVFLFPPKPKDTLMISRTPEVTCVVVDVSHEDPEVKFNWYVDGVEVHNAKTKPREEQYNSTYRVVSVLTVLHQDWLNGKEYKCKVSNKALPAPIEKTISKAKGQPREPQVYTLPPSREEMTKNQVSLTCLVKGFYPSDIAVEWESNGQPENNYKTTPPVLDSDGSFFLYSKLTVDKSRWQQGNVFSCSVMHEALHNHYTQKSLSLSPGGGGGSGGGGSGGGGSEVQLLQSGGGLVQPGGSLRLSCAASGFDFSSYPMHWVRQAPGKGLEWVGSISSSGGATPYADSVKGRFTISRDNSKNTLYLQMNSLRPEDTAVYYCAKDFYTILTGNAFDMWGQGTSVTVSSASTGGGGSGGGGSGGGGSGGGGSDIQMTQSPSSLSASLGDRVTITCRASQGISSYLAWYQQKPGKAPKLLIYASSTRQSGVPSRFSGSGSGTDFTLTISSLQPEDSGTYYCQQYWAFPLTFGGGTKVEIKRT

SEQ ID NO: 397 - DNA, 2231 bp, Artificial Sequence
  Description of Artificial Sequence: Synthetic polynucleotide
  M7-G1-M78 HC
ccatgggcttcgggttgtcgtggctctttttggtcgcaatcttgaagggtgtccagtgcgaggtccagctcgtcgagtcaggtggaggactggtgcaacccggtcgatcacttcggctgtcgtgtgcggcatcgggattcacgtttgacgattatgccatgcattgggtgcgacaagctccgggcaaagggcttgaatgggtgtccggaatctcgtgggattcggggtcagtgggctatgccgattccgtaaagggtaggttcaccatctcacgcgacaatgcgaagaattcgttgtacctccaaatgaattcgcttagggcagaagatacggccttgtactattgcgcaagggaccttgggtacaaccagtggtgggaaggtttcgattactggggtcagggaaccctggtaacggtgtcgagcgctagcactaagggaccgtccgtgtttcccctcgcgcctagctcgaagagcacatcgggaggaacagcggcgctcggctgtctcgtcaaagactacttccccgagccggtgaccgtgagctggaattccggagcgttgacctcaggggtgcatacattccctgccgtactgcaatcatcagggctctactcattgtcgagcgtagtgactgtaccgtcgtcatcgctcggaacgcagacgtacatctgcaatgtcaatcacaagccctccaatactaaggtagataagaaagtagaaccgaagtcgtgtgataagacccatacatgccctccgtgccccgcaccggaactcttgggtggcccatcagtctttctgttcccgccaaagcccaaagacacactgatgatttcgcgcacgcccgaagtcacttgcgtcgtggtggatgtgtcgcatgaggacccggaggtcaagttcaactggtacgtcgatggtgtagaagtccacaacgccaagaccaagcctcgggaggagcagtataactccacctaccgggtagtgagcgtgcttacagtgctccatcaggactggctgaacggcaaagaatacaaatgcaaagtcagcaacaaagcgctgccagcgcccatcgagaaaacaattagcaaagcgaaagggcagcccagagaacctcaagtgtatacattgccgccgtcgcgggaggaaatgacaaagaatcaggtatccctgacgtgtcttgtgaaaggcttttacccatccgacattgcggtagagtgggagtcgaatgggcaacccgagaacaactataagacgactcccccagtcttggattcagacggatcctttttcttgtactcgaaactcacagtcgacaagtccagatggcagcaggggaacgtgttcagctgcagcgtgatgcacgaggcccttcacaaccactatacgcagaaatcattaagcttatcgcccggaggaggtgggggttccgggggtgggggatccggtggaggagggtccgaggtccaactgctgcagtccggcggagggctcgtgcagcctggcggtagcctgagactttcgtgtgcggccagcgggtttgacttttcatcatatcccatgcactgggtgagacaagctccggggaaaggtcttgaatgggtcggctccatttcgtcatcgggtggtgcgaccccgtacgccgattcggtgaagggacgattcaccatctcgcgggataactcgaagaacactctttatctccagatgaattcgctgaggcccgaagatacggcagtgtattactgtgcgaaagacttctatacgattttgactggcaatgcattcgacatgtggggccagggaacgtcggtaacagtctcaagcgcatcaacaggtggtggagggtcgggaggaggaggaagcggtgggggagggtcagggggaggcggatcggacatccagatgacccagtccccttcctcgctctccgcgtccttgggtgaccgcgtaacgatcacatgcagagcaagccaaggaatttcaagctatcttgcgtggtatcagcagaagccgggtaaagcgcccaagttgttgatctacgccagctccacaaggcagtcgggggtcccctcacgcttttcggggtcgggctcgggaactgacttcaccttgacgatctccagcctccagccagaggattcagggacctactactgccaacagtactgggcgtttcccctgacattcggagggggaacaaaagtagagatcaagcggacgtgataatctaga

SEQ ID NO: 398 - protein, 739 aa, Artificial Sequence
  Description of Artificial Sequence: Synthetic polypeptide
  P4-G1-M1.3 HC
MGFGLSWLFLVAILKGVQCEVQLLQSGGGLVQPGGSLRLSCAASGFMFSRYPMHWVRQAPGKGLEWVGSISGSGGATPYADSVKGRFTISRDNSKNTLYLQMNSLRAEDTAVYYCAKDFYQILTGNAFDYWGQGTTVTVSSASTKGPSVFPLAPSSKSTSGGTAALGCLVKDYFPEPVTVSWNSGALTSGVHTFPAVLQSSGLYSLSSVVTVPSSSLGTQTYICNVNHKPSNTKVDKKVEPKSCDKTHTCPPCPAPELLGGPSVFLFPPKPKDTLMISRTPEVTCVVVDVSHEDPEVKFNWYVDGVEVHNAKTKPREEQYNSTYRVVSVLTVLHQDWLNGKEYKCKVSNKALPAPIEKTISKAKGQPREPQVYTLPPSREEMTKNQVSLTCLVKGFYPSDIAVEWESNGQPENNYKTTPPVLDSDGSFFLYSKLTVDKSRWQQGNVFSCSVMHEALHNHYTQKSLSLSPGGGGGSGGGGSGGGGSQVQLVQSGGGLVQPGGSLRLSCAASGFTFDDYAMHWVRQAPGKGLEWVAGISWDSGSTGYADSVKGRFTISRDNAKNSLYLQMNSLRAEDTALYYCARDLGAYQWVEGFDYWGQGTLVTVSSASTGGGGSGGGGSGGGGSGGGGSSYELTQDPAVSVALGQTVRITCQGDSLRSYYASWYQQKPGQAPVLVIYGKNNRPSGIPDRFSGSTSGNSASLTITGAQAEDEADYYCNSRDSPGNQWVFGGGTKVTVLG

SEQ ID NO: 399 - DNA, 2231 bp, Artificial Sequence
  Description of Artificial Sequence: Synthetic polynucleotide
  P4-G1-M1.3 HC
ccatgggctttgggctgtcgtggctttttcttgtcgcgatcctcaagggagtgcagtgcgaagtccagctgctccaaagcggcggaggactcgtacagccgggagggagcttgaggctcagctgcgctgcgtccggtttcatgttctcaagatatcccatgcactgggtgcggcaggcaccaggaaagggactggagtgggtcggttcgatttcgggctccggtggggcaaccccttatgccgattccgtcaaagggcgctttaccatttcaagggataacagcaagaacactttgtacttgcaaatgaattcgcttcgagcggaggacacagccgtgtactactgtgcgaaagacttttaccagatcttgacaggtaatgccttcgactattgggggcaggggacaacggtaacggtgtcgtccgctagcactaagggaccgtccgtgtttcccctcgcgcctagctcgaagagcacatcgggaggaacagcggcgctcggctgtctcgtcaaagactacttccccgagccggtgaccgtgagctggaattccggagcgttgacctcaggggtgcatacattccctgccgtactgcaatcatcagggctctactcattgtcgagcgtagtgactgtaccgtcgtcatcgctcggaacgcagacgtacatctgcaatgtcaatcacaagccctccaatactaaggtagataagaaagtagaaccgaagtcgtgtgataagacccatacatgccctccgtgccccgcaccggaactcttgggtggcccatcagtctttctgttcccgccaaagcccaaagacacactgatgatttcgcgcacgcccgaagtcacttgcgtcgtggtggatgtgtcgcatgaggacccggaggtcaagttcaactggtacgtcgatggtgtagaagtccacaacgccaagaccaagcctcgggaggagcagtataactccacctaccgggtagtgagcgtgcttacagtgctccatcaggactggctgaacggcaaagaatacaaatgcaaagtcagcaacaaagcgctgccagcgcccatcgagaaaacaattagcaaagcgaaagggcagcccagagaacctcaagtgtatacattgccgccgtcgcgggaggaaatgacaaagaatcaggtatccctgacgtgtcttgtgaaaggcttttacccatccgacattgcggtagagtgggagtcgaatgggcaacccgagaacaactataagacgactcccccagtcttggattcagacggatcctttttcttgtactcgaaactcacagtcgacaagtccagatggcagcaggggaacgtgttcagctgcagcgtgatgcacgaggcccttcacaaccactatacgcagaaatcattaagcttatcgcctggcggtggaggagggtcaggaggcggagggtcgggaggtggcgggtcgcaagtccagttggtccagtcgggaggcggactcgtccagcccggaggttcgcttcgattgtcgtgtgccgcatccggattcacttttgacgactacgcgatgcactgggtgagacaggctccggggaaagggctggagtgggtggcggggatttcgtgggattccgggagcaccggatacgccgactccgtgaaaggacggttcacgatttcaagagataatgccaagaactcgctctatttgcagatgaattcacttagggctgaagatacagcgttgtactactgtgcgcgcgaccttggagcatatcagtgggtggagggcttcgattactggggccaagggactcttgtgacagtctcaagcgcctcgacaggaggaggtggatcaggtggtggaggttcagggggagggggttcgggaggaggaggatccagctatgaactgacacaagatcccgcagtgtcggtagcgctcgggcagactgtacgcatcacctgccagggggactcactgcggagctattacgcgtcgtggtatcagcaaaagccaggacaggcgccagtgctggtcatctacgggaagaacaaccggccctcggggatcccggacaggttctccgggtccaccagcggtaactccgcttcactcacgatcacaggggcccaggccgaggacgaagcggactattactgcaacagccgagatagcccgggtaatcaatgggtatttgggggtggtacgaaagtaacggtgcttggctgataatctaga

SEQ ID NO: 400 - protein, 739 aa, Artificial Sequence
  Description of Artificial Sequence: Synthetic polypeptide
  P4-G1-C8 HC
MGFGLSWLFLVAILKGVQCEVQLLQSGGGLVQPGGSLRLSCAASGFMFSRYPMHWVRQAPGKGLEWVGSISGSGGATPYADSVKGRFTISRDNSKNTLYLQMNSLRAEDTAVYYCAKDFYQILTGNAFDYWGQGTTVTVSSASTKGPSVFPLAPSSKSTSGGTAALGCLVKDYFPEPVTVSWNSGALTSGVHTFPAVLQSSGLYSLSSVVTVPSSSLGTQTYICNVNHKPSNTKVDKKVEPKSCDKTHTCPPCPAPELLGGPSVFLFPPKPKDTLMISRTPEVTCVVVDVSHEDPEVKFNWYVDGVEVHNAKTKPREEQYNSTYRVVSVLTVLHQDWLNGKEYKCKVSNKALPAPIEKTISKAKGQPREPQVYTLPPSREEMTKNQVSLTCLVKGFYPSDIAVEWESNGQPENNYKTTPPVLDSDGSFFLYSKLTVDKSRWQQGNVFSCSVMHEALHNHYTQKSLSLSPGGGGGSGGGGSGGGGSQVQLVQSGGGLVQPGGSLRLSCAASGFTFDDYAMHWVRQAPGKGLEWVAGISWNSGSIGYADSVKGRFTISRDNAKNSLYLQMNSLRPEDTAVYYCARDLGYNQWVEGFDYWGQGTLVTVSSASTGGGGSGGGGSGGGGSGGGGSSYELTQDPAVSVALGQTVRITCQGDSLRSYYASWYQQKPGQAPVLVIYGKNNRPSGIPDRFSGSTSGNSASLTITGAQAEDEADYYCNSRDSSGNHWVFGGGTKVTVLG

SEQ ID NO: 401 - DNA, 2231 bp, Artificial Sequence
  Description of Artificial Sequence: Synthetic polynucleotide
  P4-G1-C8 HC
ccatgggctttgggctgtcgtggctttttcttgtcgcgatcctcaagggagtgcagtgcgaagtccagctgctccaaagcggcggaggactcgtacagccgggagggagcttgaggctcagctgcgctgcgtccggtttcatgttctcaagatatcccatgcactgggtgcggcaggcaccaggaaagggactggagtgggtcggttcgatttcgggctccggtggggcaaccccttatgccgattccgtcaaagggcgctttaccatttcaagggataacagcaagaacactttgtacttgcaaatgaattcgcttcgagcggaggacacagccgtgtactactgtgcgaaagacttttaccagatcttgacaggtaatgccttcgactattgggggcaggggacaacggtaacggtgtcgtccgctagcactaagggaccgtccgtgtttcccctcgcgcctagctcgaagagcacatcgggaggaacagcggcgctcggctgtctcgtcaaagactacttccccgagccggtgaccgtgagctggaattccggagcgttgacctcaggggtgcatacattccctgccgtactgcaatcatcagggctctactcattgtcgagcgtagtgactgtaccgtcgtcatcgctcggaacgcagacgtacatctgcaatgtcaatcacaagccctccaatactaaggtagataagaaagtagaaccgaagtcgtgtgataagacccatacatgccctccgtgccccgcaccggaactcttgggtggcccatcagtctttctgttcccgccaaagcccaaagacacactgatgatttcgcgcacgcccgaagtcacttgcgtcgtggtggatgtgtcgcatgaggacccggaggtcaagttcaactggtacgtcgatggtgtagaagtccacaacgccaagaccaagcctcgggaggagcagtataactccacctaccgggtagtgagcgtgcttacagtgctccatcaggactggctgaacggcaaagaatacaaatgcaaagtcagcaacaaagcgctgccagcgcccatcgagaaaacaattagcaaagcgaaagggcagcccagagaacctcaagtgtatacattgccgccgtcgcgggaggaaatgacaaagaatcaggtatccctgacgtgtcttgtgaaaggcttttacccatccgacattgcggtagagtgggagtcgaatgggcaacccgagaacaactataagacgactcccccagtcttggattcagacggatcctttttcttgtactcgaaactcacagtcgacaagtccagatggcagcaggggaacgtgttcagctgcagcgtgatgcacgaggcccttcacaaccactatacgcagaaatcattaagcttatcgcccggaggaggcggagggtcaggtgggggtggttcgggcggagggggatcccaagtgcagctggtccagtcgggtgggggcttggtgcagccgggtggatcactgcgcctttcgtgcgccgcaagcgggtttacattcgatgattacgcgatgcattgggtgagacaggcacctggtaaagggcttgaatgggtggcagggatctcatggaattcgggatccattggatacgcagactcagtcaagggacgcttcacgatcagccgggacaatgcgaagaactcactgtatcttcagatgaattcgctcagacccgaggacaccgcagtgtactattgtgcccgcgaccttggctacaatcaatgggtagagggtttcgattattggggacagggaacgcttgtcactgtctccagcgcgtccacgggagggggaggtagcggtgggggagggtccgggggagggggttccggcggaggagggtcatcgtatgaactcacacaagatcccgcggtatccgtggcgctcggtcagacagtaaggattacatgtcagggagacagcttgcgatcctactatgcgagctggtatcagcagaaaccgggacaggcgccagtgttggtcatctacgggaaaaacaaccggccttcgggaatcccggaccggttttcgggtagcacttcggggaattcggcgtcactgactattacgggagcgcaagctgaagatgaggccgactactactgcaacagccgagattcctcggggaaccactgggtgtttggaggcggtacgaaggtcaccgtcttggggtgataatctaga

SEQ ID NO: 402 - protein, 235 aa, Artificial Sequence
  Description of Artificial Sequence: Synthetic polypeptide
  M7 LAMBDA LIGHT CHAIN
MAWRLWWLLLLLLLLWPMVWASSELTQDPAVSVALGQTVRITCQGDSLRSYYASWYQQKPGQAPVLVIYGKNNRPSGIPDRFSGSSSGNTASLTITGAQAEDEADYYCNSRDTPGNKWVFGGGTKVTVIGQPKAAPSVTLFPPSSEELQANKATLVCLVSDFYPGAVTVAWKADGSPVKVGVETTKPSKQSNNKYAASSYLSLTPEQWKSHRSYSCRVTHEGSTVEKTVAPAECS

SEQ ID NO: 403 - DNA, 719 bp, Artificial Sequence
  Description of Artificial Sequence: Synthetic polynucleotide
  M7 LAMBDA LIGHT CHAIN
ccatggcctggcggttgtggtggcttttgctcctccttctgttgctttggcctatggtgtgggcctcaagcgaattgacccaagaccccgcagtctccgtggcgcttgggcaaactgtgagaatcacgtgtcaaggagacagccttagaagctactatgcctcgtggtatcagcagaagccaggtcaggccccagtcctcgtgatctacgggaagaacaaccgcccctcgggtattcccgaccgcttttcgggatcgtcctccggaaatacggcttccctgacgatcaccggagcccaagcggaagatgaggcggattactattgcaactcacgggacacgccgggtaacaagtgggtattcgggggaggcactaaagtaacagtgattggccagcctaaagcggcaccgtcggtgactctctttcccccgtcatcggaagagcttcaggcgaataaggcgacactggtatgcttggtcagcgatttctacccgggagccgtaacggtcgcgtggaaagcggacgggtcgcccgtgaaagtcggggtcgagacaacgaaaccctcaaaacagtcgaataacaagtacgcggcatcatcatatctctcattgacccctgaacagtggaagagccataggtcgtactcgtgtcgagtcacacacgagggatccaccgtagaaaagacagtggctcctgccgagtgttcctgataatctaga

SEQ ID NO: 404 - protein, 234 aa, Artificial Sequence
  Description of Artificial Sequence: Synthetic polypeptide
  P4 KAPPA LIGHT CHAIN
MGTPAQLLFLLLLWLPDTTGDIQMTQSPSSLSASLGDRVTITCRASQGISSYLAWYQQKPGKAPKLLIYAKSTLQSGVPSRFSGSGSGTDFTLTISSLQPEDSATYYCQQYWTFPLTFGGGTKVEIKRTVAAPSVFIFPPSDEQLKSGTASVVCLLNNFYPREAKVQWKVDNALQSGNSQESVTEQDSKDSTYSLSSTLTLSKADYEKHKVYACEVTHQGLSSPVTKSFNRGEC

SEQ ID NO: 405 - DNA, 716 bp, Artificial Sequence
  Description of Artificial Sequence: Synthetic polynucleotide
  P4 KAPPA LIGHT CHAIN
ccatgggcactcccgcgcagctccttttcctccttttgctttggttgccggacacgacaggcgatattcaaatgacacagtcaccctcgtcactcagcgccagccttggggaccgcgtaacgatcacgtgtagagcgtcgcaggggatttcctcgtatctggcgtggtatcagcaaaagcctggtaaagctccgaaactcctgatctacgccaagtcgaccttgcagtccggagtcccctcaaggttcagcgggtcgggatccggtacagatttcaccctgaccatctcaagcctccagccagaggactccgcaacgtactattgccagcagtactggacgtttcctttgacttttggaggcggaacaaaggtggaaatcaaacgtacggtcgcagctccttcggtattcatctttccgccctccgatgagcagctcaaatccggtacagcctcggtggtgtgcctgctgaataacttctatccccgggaggcgaaagtgcagtggaaagtggacaacgcgctccaatcaggaaattcccaagaatcagtcacagaacaggattcgaaagactcgacctactcactttcgtcgaccttgacgctctccaaggccgactacgagaaacacaaggtgtatgcgtgtgaagtcacacatcaagggctttcatccccagtcacgaagtcattcaaccgcggtgaatgttgataatctaga

SEQ ID NO: 406 - protein, 329 aa, Artificial Sequence
  Description of Artificial Sequence: Synthetic polypeptide
  IgG1 module with hinge
ASTKGPSVFPLAPSSKSTSGGTAALGCLVKDYFPEPVTVSWNSGALTSGVHTFPAVLQSSGLYSLSSVVTVPSSSLGTQTYICNVNHKPSNTKVDKKVEPKSCDKTHTCPPCPAPELLGGPSVFLFPPKPKDTLMISRTPEVTCVVVDVSHEDPEVKFNWYVDGVEVHNAKTKPREEQYNSTYRVVSVLTVLHQDWLNGKEYKCKVSNKALPAPIEKTISKAKGQPREPQVYTLPPSREEMTKNQVSLTCLVKGFYPSDIAVEWESNGQPENNYKTTPPVLDSDGSFFLYSKLTVDKSRWQQGNVFSCSVMHEALHNHYTQKSLSLSPG

SEQ ID NO: 407 - DNA, 2166 bp, Artificial Sequence
  Description of Artificial Sequence: Synthetic polynucleotide
  P4M-G1-M1.3 HC
gaggtgcagcttctccaatcgggaggcgggctggtccagccgggtggttcacttcggctctcatgtgcagcgtcggggtttatgttcagcaggtatcctatgcactgggtacgacaagccccagggaagggtttggagtgggtgagctcgatctccggatcaggtggagccacaccctatgcggacagcgtcaaggggcgcttcaccatctccagagacaatagcaaaaacacgctgtatcttcagatgaactcgctccgggcagaagatactgcggtgtactactgcgctaaggatttctaccagattttgaccggcaatgcgtttgactactggggacagggaacaacggtcacggtgtcgtcggctagcactaagggaccgtccgtgtttcccctcgcgcctagctcgaagagcacatcgggaggaacagcggcgctcggctgtctcgtcaaagactacttccccgagccggtgaccgtgagctggaattccggagcgttgacctcaggggtgcatacattccctgccgtactgcaatcatcagggctctactcattgtcgagcgtagtgactgtaccgtcgtcatcgctcggaacgcagacgtacatctgcaatgtcaatcacaagccctccaatactaaggtagataagaaagtagaaccgaagtcgtgtgataagacccatacatgccctccgtgccccgcaccggaactcttgggtggcccatcagtctttctgttcccgccaaagcccaaagacacactgatgatttcgcgcacgcccgaagtcacttgcgtcgtggtggatgtgtcgcatgaggacccggaggtcaagttcaactggtacgtcgatggtgtagaagtccacaacgccaagaccaagcctcgggaggagcagtataactccacctaccgggtagtgagcgtgcttacagtgctccatcaggactggctgaacggcaaagaatacaaatgcaaagtcagcaacaaagcgctgccagcgcccatcgagaaaacaattagcaaagcgaaagggcagcccagagaacctcaagtgtatacattgccgccgtcgcgggaggaaatgacaaagaatcaggtatccctgacgtgtcttgtgaaaggcttttacccatccgacattgcggtagagtgggagtcgaatgggcaacccgagaacaactataagacgactcccccagtcttggattcagacggatcctttttcttgtactcgaaactcacagtcgacaagtccagatggcagcaggggaacgtgttcagctgcagcgtgatgcacgaggcccttcacaaccactatacgcagaaatcattaagcttatcgcctggcggtggaggagggtcaggaggcggagggtcgggaggtggcgggtcgcaagtccagttggtccagtcgggaggcggactcgtccagcccggaggttcgcttcgattgtcgtgtgccgcatccggattcacttttgacgactacgcgatgcactgggtgagacaggctccggggaaagggctggagtgggtggcggggatttcgtgggattccgggagcaccggatacgccgactccgtgaaaggacggttcacgatttcaagagataatgccaagaactcgctctatttgcagatgaattcacttagggctgaagatacagcgttgtactactgtgcgcgcgaccttggagcatatcagtgggtggagggcttcgattactggggccaagggactcttgtgacagtctcaagcgcctcgacaggaggaggtggatcaggtggtggaggttcagggggagggggttcgggaggaggaggatccagctatgaactgacacaagatcccgcagtgtcggtagcgctcgggcagactgtacgcatcacctgccagggggactcactgcggagctattacgcgtcgtggtatcagcaaaagccaggacaggcgccagtgctggtcatctacgggaagaacaaccggccctcggggatcccggacaggttctccgggtccaccagcggtaactccgcttcactcacgatcacaggggcccaggccgaggacgaagcggactattactgcaacagccgagatagcccgggtaatcaatgggtatttgggggtggtacgaaagtaacggtgcttggctgataa

SEQ ID NO: 408 - DNA, 2166 bp, Artificial Sequence
  Description of Artificial Sequence: Synthetic polynucleotide
  P4M -G1-C8 HC
gaggtgcagcttctccaatcgggaggcgggctggtccagccgggtggttcacttcggctctcatgtgcagcgtcggggtttatgttcagcaggtatcctatgcactgggtacgacaagccccagggaagggtttggagtgggtgagctcgatctccggatcaggtggagccacaccctatgcggacagcgtcaaggggcgcttcaccatctccagagacaatagcaaaaacacgctgtatcttcagatgaactcgctccgggcagaagatactgcggtgtactactgcgctaaggatttctaccagattttgaccggcaatgcgtttgactactggggacagggaacaacggtcacggtgtcgtcggctagcactaagggaccgtccgtgtttcccctcgcgcctagctcgaagagcacatcgggaggaacagcggcgctcggctgtctcgtcaaagactacttccccgagccggtgaccgtgagctggaattccggagcgttgacctcaggggtgcatacattccctgccgtactgcaatcatcagggctctactcattgtcgagcgtagtgactgtaccgtcgtcatcgctcggaacgcagacgtacatctgcaatgtcaatcacaagccctccaatactaaggtagataagaaagtagaaccgaagtcgtgtgataagacccatacatgccctccgtgccccgcaccggaactcttgggtggcccatcagtctttctgttcccgccaaagcccaaagacacactgatgatttcgcgcacgcccgaagtcacttgcgtcgtggtggatgtgtcgcatgaggacccggaggtcaagttcaactggtacgtcgatggtgtagaagtccacaacgccaagaccaagcctcgggaggagcagtataactccacctaccgggtagtgagcgtgcttacagtgctccatcaggactggctgaacggcaaagaatacaaatgcaaagtcagcaacaaagcgctgccagcgcccatcgagaaaacaattagcaaagcgaaagggcagcccagagaacctcaagtgtatacattgccgccgtcgcgggaggaaatgacaaagaatcaggtatccctgacgtgtcttgtgaaaggcttttacccatccgacattgcggtagagtgggagtcgaatgggcaacccgagaacaactataagacgactcccccagtcttggattcagacggatcctttttcttgtactcgaaactcacagtcgacaagtccagatggcagcaggggaacgtgttcagctgcagcgtgatgcacgaggcccttcacaaccactatacgcagaaatcattaagcttatcgcccggaggaggcggagggtcaggtgggggtggttcgggcggagggggatcccaagtgcagctggtccagtcgggtgggggcttggtgcagccgggtggatcactgcgcctttcgtgcgccgcaagcgggtttacattcgatgattacgcgatgcattgggtgagacaggcacctggtaaagggcttgaatgggtggcagggatctcatggaattcgggatccattggatacgcagactcagtcaagggacgcttcacgatcagccgggacaatgcgaagaactcactgtatcttcagatgaattcgctcagacccgaggacaccgcagtgtactattgtgcccgcgaccttggctacaatcaatgggtagagggtttcgattattggggacagggaacgcttgtcactgtctccagcgcgtccacgggagggggaggtagcggtgggggagggtccgggggagggggttccggcggaggagggtcatcgtatgaactcacacaagatcccgcggtatccgtggcgctcggtcagacagtaaggattacatgtcagggagacagcttgcgatcctactatgcgagctggtatcagcagaaaccgggacaggcgccagtgttggtcatctacgggaaaaacaaccggccttcgggaatcccggaccggttttcgggtagcacttcggggaattcggcgtcactgactattacgggagcgcaagctgaagatgaggccgactactactgcaacagccgagattcctcggggaaccactgggtgtttggaggcggtacgaaggtcaccgtcttggggtgataa

SEQ ID NO: 409 - DNA, 2166 bp, Artificial Sequence
  Description of Artificial Sequence: Synthetic polynucleotide
  P4M-G1-P6L HC
gaggtgcagcttctccaatcgggaggcgggctggtccagccgggtggttcacttcggctctcatgtgcagcgtcggggtttatgttcagcaggtatcctatgcactgggtacgacaagccccagggaagggtttggagtgggtgagctcgatctccggatcaggtggagccacaccctatgcggacagcgtcaaggggcgcttcaccatctccagagacaatagcaaaaacacgctgtatcttcagatgaactcgctccgggcagaagatactgcggtgtactactgcgctaaggatttctaccagattttgaccggcaatgcgtttgactactggggacagggaacaacggtcacggtgtcgtcggctagcactaagggaccgtccgtgtttcccctcgcgcctagctcgaagagcacatcgggaggaacagcggcgctcggctgtctcgtcaaagactacttccccgagccggtgaccgtgagctggaattccggagcgttgacctcaggggtgcatacattccctgccgtactgcaatcatcagggctctactcattgtcgagcgtagtgactgtaccgtcgtcatcgctcggaacgcagacgtacatctgcaatgtcaatcacaagccctccaatactaaggtagataagaaagtagaaccgaagtcgtgtgataagacccatacatgccctccgtgccccgcaccggaactcttgggtggcccatcagtctttctgttcccgccaaagcccaaagacacactgatgatttcgcgcacgcccgaagtcacttgcgtcgtggtggatgtgtcgcatgaggacccggaggtcaagttcaactggtacgtcgatggtgtagaagtccacaacgccaagaccaagcctcgggaggagcagtataactccacctaccgggtagtgagcgtgcttacagtgctccatcaggactggctgaacggcaaagaatacaaatgcaaagtcagcaacaaagcgctgccagcgcccatcgagaaaacaattagcaaagcgaaagggcagcccagagaacctcaagtgtatacattgccgccgtcgcgggaggaaatgacaaagaatcaggtatccctgacgtgtcttgtgaaaggcttttacccatccgacattgcggtagagtgggagtcgaatgggcaacccgagaacaactataagacgactcccccagtcttggattcagacggatcctttttcttgtactcgaaactcacagtcgacaagtccagatggcagcaggggaacgtgttcagctgcagcgtgatgcacgaggcccttcacaaccactatacgcagaaatcattaagcttatcgcccggaggagggggagggagcggcggtggagggtccggaggtggaggaagcgaggtgcagctcgtggagtcgggagggggactcgtccagcccgggagaagccttaggctctcgtgtgccgcctcggggtttacgttcgatgactatgccatgcattgggtcagacaggcaccaggaaaaggtcttgaatgggtgtccggaatctcatggaactccgggtcaacaggatacgctgattccgtaaaaggccgcttcaccatctccagagacaatgcgaagaactcattgtacctccagatgaactcactcagggcggaggacaccgcactgtactactgcgccagggacctcgggtacaaccagtggttggaggggtttgattattggggtcaggggaccttggtcacagtaagctccgccagcacagggggtggcggatccggaggcggtggcagcggaggaggtggatccgggggtggtgggtcgtcaagcgagctgactcaagatccggcggtgtcagtcgcgcttggacagacagtgcgcattacgtgccagggcgactcgcttcggagctactatgcgtcatggtatcaacagaagccgggtcaagcgcctgtgttggtcatctacgggaagaacaatcggccctcggggatccctgaccgattcagcggttcatcatccggtaatacggcatcgcttactattacgggagcacaggcggaagatgaagccgattactattgtatgtcgcgggaccacccggggaatcagtgggtgtttgggggaggaactaaagtaacggtattggggtgataa

SEQ ID NO: 410 - DNA, 2166 bp, Artificial Sequence
  Description of Artificial Sequence: Synthetic polynucleotide
  P33M-G1-M1.3 HC
gaggtacagctgcttcagtccgggggaggactcgtccagccgggaggatcgctccgcctttcatgcgctgcctccggcttcttcttctcgaaatatcctatgcactgggtgcgacaggctcccgggaagggcttggaatgggtcagcagcatcagctcggacggaggggccacggtgtacgcggattcggtcaagggtaggtttacgatctcgcgggataactcaaagaataccctgtatctccaaatgaactccttgagagcagaggacacagcggtatactattgtgcgaaagacttttacacaatcctgacaggtaatgcgtttgatacgtggggtcaggggactaccgtaactgtgtcatcggctagcactaagggaccgtccgtgtttcccctcgcgcctagctcgaagagcacatcgggaggaacagcggcgctcggctgtctcgtcaaagactacttccccgagccggtgaccgtgagctggaattccggagcgttgacctcaggggtgcatacattccctgccgtactgcaatcatcagggctctactcattgtcgagcgtagtgactgtaccgtcgtcatcgctcggaacgcagacgtacatctgcaatgtcaatcacaagccctccaatactaaggtagataagaaagtagaaccgaagtcgtgtgataagacccatacatgccctccgtgccccgcaccggaactcttgggtggcccatcagtctttctgttcccgccaaagcccaaagacacactgatgatttcgcgcacgcccgaagtcacttgcgtcgtggtggatgtgtcgcatgaggacccggaggtcaagttcaactggtacgtcgatggtgtagaagtccacaacgccaagaccaagcctcgggaggagcagtataactccacctaccgggtagtgagcgtgcttacagtgctccatcaggactggctgaacggcaaagaatacaaatgcaaagtcagcaacaaagcgctgccagcgcccatcgagaaaacaattagcaaagcgaaagggcagcccagagaacctcaagtgtatacattgccgccgtcgcgggaggaaatgacaaagaatcaggtatccctgacgtgtcttgtgaaaggcttttacccatccgacattgcggtagagtgggagtcgaatgggcaacccgagaacaactataagacgactcccccagtcttggattcagacggatcctttttcttgtactcgaaactcacagtcgacaagtccagatggcagcaggggaacgtgttcagctgcagcgtgatgcacgaggcccttcacaaccactatacgcagaaatcattaagcttatcgcctggcggtggaggagggtcaggaggcggagggtcgggaggtggcgggtcgcaagtccagttggtccagtcgggaggcggactcgtccagcccggaggttcgcttcgattgtcgtgtgccgcatccggattcacttttgacgactacgcgatgcactgggtgagacaggctccggggaaagggctggagtgggtggcggggatttcgtgggattccgggagcaccggatacgccgactccgtgaaaggacggttcacgatttcaagagataatgccaagaactcgctctatttgcagatgaattcacttagggctgaagatacagcgttgtactactgtgcgcgcgaccttggagcatatcagtgggtggagggcttcgattactggggccaagggactcttgtgacagtctcaagcgcctcgacaggaggaggtggatcaggtggtggaggttcagggggagggggttcgggaggaggaggatccagctatgaactgacacaagatcccgcagtgtcggtagcgctcgggcagactgtacgcatcacctgccagggggactcactgcggagctattacgcgtcgtggtatcagcaaaagccaggacaggcgccagtgctggtcatctacgggaagaacaaccggccctcggggatcccggacaggttctccgggtccaccagcggtaactccgcttcactcacgatcacaggggcccaggccgaggacgaagcggactattactgcaacagccgagatagcccgggtaatcaatgggtatttgggggtggtacgaaagtaacggtgcttggctgataa

SEQ ID NO: 411 - DNA, 2166 bp, Artificial Sequence
  Description of Artificial Sequence: Synthetic polynucleotide
  P33M -G1-C8 HC
gaggtacagctgcttcagtccgggggaggactcgtccagccgggaggatcgctccgcctttcatgcgctgcctccggcttcttcttctcgaaatatcctatgcactgggtgcgacaggctcccgggaagggcttggaatgggtcagcagcatcagctcggacggaggggccacggtgtacgcggattcggtcaagggtaggtttacgatctcgcgggataactcaaagaataccctgtatctccaaatgaactccttgagagcagaggacacagcggtatactattgtgcgaaagacttttacacaatcctgacaggtaatgcgtttgatacgtggggtcaggggactaccgtaactgtgtcatcggctagcactaagggaccgtccgtgtttcccctcgcgcctagctcgaagagcacatcgggaggaacagcggcgctcggctgtctcgtcaaagactacttccccgagccggtgaccgtgagctggaattccggagcgttgacctcaggggtgcatacattccctgccgtactgcaatcatcagggctctactcattgtcgagcgtagtgactgtaccgtcgtcatcgctcggaacgcagacgtacatctgcaatgtcaatcacaagccctccaatactaaggtagataagaaagtagaaccgaagtcgtgtgataagacccatacatgccctccgtgccccgcaccggaactcttgggtggcccatcagtctttctgttcccgccaaagcccaaagacacactgatgatttcgcgcacgcccgaagtcacttgcgtcgtggtggatgtgtcgcatgaggacccggaggtcaagttcaactggtacgtcgatggtgtagaagtccacaacgccaagaccaagcctcgggaggagcagtataactccacctaccgggtagtgagcgtgcttacagtgctccatcaggactggctgaacggcaaagaatacaaatgcaaagtcagcaacaaagcgctgccagcgcccatcgagaaaacaattagcaaagcgaaagggcagcccagagaacctcaagtgtatacattgccgccgtcgcgggaggaaatgacaaagaatcaggtatccctgacgtgtcttgtgaaaggcttttacccatccgacattgcggtagagtgggagtcgaatgggcaacccgagaacaactataagacgactcccccagtcttggattcagacggatcctttttcttgtactcgaaactcacagtcgacaagtccagatggcagcaggggaacgtgttcagctgcagcgtgatgcacgaggcccttcacaaccactatacgcagaaatcattaagcttatcgcccggaggaggcggagggtcaggtgggggtggttcgggcggagggggatcccaagtgcagctggtccagtcgggtgggggcttggtgcagccgggtggatcactgcgcctttcgtgcgccgcaagcgggtttacattcgatgattacgcgatgcattgggtgagacaggcacctggtaaagggcttgaatgggtggcagggatctcatggaattcgggatccattggatacgcagactcagtcaagggacgcttcacgatcagccgggacaatgcgaagaactcactgtatcttcagatgaattcgctcagacccgaggacaccgcagtgtactattgtgcccgcgaccttggctacaatcaatgggtagagggtttcgattattggggacagggaacgcttgtcactgtctccagcgcgtccacgggagggggaggtagcggtgggggagggtccgggggagggggttccggcggaggagggtcatcgtatgaactcacacaagatcccgcggtatccgtggcgctcggtcagacagtaaggattacatgtcagggagacagcttgcgatcctactatgcgagctggtatcagcagaaaccgggacaggcgccagtgttggtcatctacgggaaaaacaaccggccttcgggaatcccggaccggttttcgggtagcacttcggggaattcggcgtcactgactattacgggagcgcaagctgaagatgaggccgactactactgcaacagccgagattcctcggggaaccactgggtgtttggaggcggtacgaaggtcaccgtcttggggtgataa

SEQ ID NO: 412 - DNA, 2166 bp, Artificial Sequence
  Description of Artificial Sequence: Synthetic polynucleotide
  P33M-G1-P6L HC
gaggtacagctgcttcagtccgggggaggactcgtccagccgggaggatcgctccgcctttcatgcgctgcctccggcttcttcttctcgaaatatcctatgcactgggtgcgacaggctcccgggaagggcttggaatgggtcagcagcatcagctcggacggaggggccacggtgtacgcggattcggtcaagggtaggtttacgatctcgcgggataactcaaagaataccctgtatctccaaatgaactccttgagagcagaggacacagcggtatactattgtgcgaaagacttttacacaatcctgacaggtaatgcgtttgatacgtggggtcaggggactaccgtaactgtgtcatcggctagcactaagggaccgtccgtgtttcccctcgcgcctagctcgaagagcacatcgggaggaacagcggcgctcggctgtctcgtcaaagactacttccccgagccggtgaccgtgagctggaattccggagcgttgacctcaggggtgcatacattccctgccgtactgcaatcatcagggctctactcattgtcgagcgtagtgactgtaccgtcgtcatcgctcggaacgcagacgtacatctgcaatgtcaatcacaagccctccaatactaaggtagataagaaagtagaaccgaagtcgtgtgataagacccatacatgccctccgtgccccgcaccggaactcttgggtggcccatcagtctttctgttcccgccaaagcccaaagacacactgatgatttcgcgcacgcccgaagtcacttgcgtcgtggtggatgtgtcgcatgaggacccggaggtcaagttcaactggtacgtcgatggtgtagaagtccacaacgccaagaccaagcctcgggaggagcagtataactccacctaccgggtagtgagcgtgcttacagtgctccatcaggactggctgaacggcaaagaatacaaatgcaaagtcagcaacaaagcgctgccagcgcccatcgagaaaacaattagcaaagcgaaagggcagcccagagaacctcaagtgtatacattgccgccgtcgcgggaggaaatgacaaagaatcaggtatccctgacgtgtcttgtgaaaggcttttacccatccgacattgcggtagagtgggagtcgaatgggcaacccgagaacaactataagacgactcccccagtcttggattcagacggatcctttttcttgtactcgaaactcacagtcgacaagtccagatggcagcaggggaacgtgttcagctgcagcgtgatgcacgaggcccttcacaaccactatacgcagaaatcattaagcttatcgcccggaggagggggagggagcggcggtggagggtccggaggtggaggaagcgaggtgcagctcgtggagtcgggagggggactcgtccagcccgggagaagccttaggctctcgtgtgccgcctcggggtttacgttcgatgactatgccatgcattgggtcagacaggcaccaggaaaaggtcttgaatgggtgtccggaatctcatggaactccgggtcaacaggatacgctgattccgtaaaaggccgcttcaccatctccagagacaatgcgaagaactcattgtacctccagatgaactcactcagggcggaggacaccgcactgtactactgcgccagggacctcgggtacaaccagtggttggaggggtttgattattggggtcaggggaccttggtcacagtaagctccgccagcacagggggtggcggatccggaggcggtggcagcggaggaggtggatccgggggtggtgggtcgtcaagcgagctgactcaagatccggcggtgtcagtcgcgcttggacagacagtgcgcattacgtgccagggcgactcgcttcggagctactatgcgtcatggtatcaacagaagccgggtcaagcgcctgtgttggtcatctacgggaagaacaatcggccctcggggatccctgaccgattcagcggttcatcatccggtaatacggcatcgcttactattacgggagcacaggcggaagatgaagccgattactattgtatgtcgcgggaccacccggggaatcagtgggtgtttgggggaggaactaaagtaacggtattggggtgataa

SEQ ID NO: 413 - DNA, 2166 bp, Artificial Sequence
  Description of Artificial Sequence: Synthetic polynucleotide
  P1-G1-M76
gaggtccagctcgtcgagtcaggtggaggactggtgcaacccggtcgatcacttcggctgtcgtgtgcggcatcgggattcacgtttgacgattatgccatgcattgggtgcgacaagctccgggcaaagggcttgaatgggtgtccggaatctcgtgggattcggggtcaacgggctatgccgattccgtaaagggtaggttcaccatctcacgcgacaatgcgaagaattcgttgtatcttcagatgaattcgcttagggcagaagatacggccttgtactattgcgcaagggaccttggggcgtaccagtgggtcgagggtttcgattactggggtcagggaaccctggtaacggtgtcgagcgctagcactaagggaccgtccgtgtttcccctcgcgcctagctcgaagagcacatcgggaggaacagcggcgctcggctgtctcgtcaaagactacttccccgagccggtgaccgtgagctggaattccggagcgttgacctcaggggtgcatacattccctgccgtactgcaatcatcagggctctactcattgtcgagcgtagtgactgtaccgtcgtcatcgctcggaacgcagacgtacatctgcaatgtcaatcacaagccctccaatactaaggtagataagaaagtagaaccgaagtcgtgtgataagacccatacatgccctccgtgccccgcaccggaactcttgggtggcccatcagtctttctgttcccgccaaagcccaaagacacactgatgatttcgcgcacgcccgaagtcacttgcgtcgtggtggatgtgtcgcatgaggacccggaggtcaagttcaactggtacgtcgatggtgtagaagtccacaacgccaagaccaagcctcgggaggagcagtataactccacctaccgggtagtgagcgtgcttacagtgctccatcaggactggctgaacggcaaagaatacaaatgcaaagtcagcaacaaagcgctgccagcgcccatcgagaaaacaattagcaaagcgaaagggcagcccagagaacctcaagtgtatacattgccgccgtcgcgggaggaaatgacaaagaatcaggtatccctgacgtgtcttgtgaaaggcttttacccatccgacattgcggtagagtgggagtcgaatgggcaacccgagaacaactataagacgactcccccagtcttggattcagacggatcctttttcttgtactcgaaactcacagtcgacaagtccagatggcagcaggggaacgtgttcagctgcagcgtgatgcacgaggcccttcacaaccactatacgcagaaatcattaagcttaagccccggtggtggtgggggatcaggagggggtggaagcggaggtggcgggagcgaggtccaacttctccagagcgggggagggttggtgcagccgggtgggtccctgcgcctttcgtgcgctgcctccggatttctcttcagctcatatcctatgcactgggtgcgccaggcaccagggaaaggccttgagtgggtcgggtcgatctcgccatccggtggagccacgccctacgcagatagcgtaaaagggcgattcaccatttcgcgggacaattcaaagaacaccctctaccttcagatgaactcgttgaggcccgaggacacagccgtgtactactgcgcgaaggatttctataacattctgacgggtaatgcgtttgataagtggggacagggtacttcggtcacggtgtcgtcagcctcgactggtggaggtgggtccggtgggggtggatcaggtggaggagggtcgggaggagggggatccgacatccagctcacacagtccccctcgtcgttgtcagcgagcctgggtgatcgggtaactatcacatgtagagcatcccagggcatttcatcctatttggcgtggtatcagcagaagcccgggaaagcgcctaagttgctgatctacgcgggatcgacgccgcaatcaggggtgccctcaagattttcggggtcggggagcggaacagaattcacactcacaatctcctcgctccaaccggaggactcagggacctattactgtcagcaatactggacttggccgctgacctttggagggggcacgaaggtcgaaatcaaaaggacgtgataa

SEQ ID NO: 414 - DNA, 648 bp, Artificial Sequence
  Description of Artificial Sequence: Synthetic polynucleotide
  P33M KAPPA LIGHT CHAIN
gatatccaaatgacgcagtcgccatcgtcgctgagcgcgtcaaccggtgatagagtcacaattacatgcagggcgtcgcagggcatttcatcatacttggcatggtatcaacagaaaccggggaaagcgcccaagttgctcatctacgcccggtccacacgacagagcggtgtacctagccggttctcgggatcggggtccgggacggacttcaccctgaccatctcctcacttcagccggaggactttgctacgtactattgtcagcaatattggcgctggccccttactttcgggggaggaacaaaggtggaaatcaagcgtacggtcgcagctccttcggtattcatctttccgccctccgatgagcagctcaaatccggtacagcctcggtggtgtgcctgctgaataacttctatccccgggaggcgaaagtgcagtggaaagtggacaacgcgctccaatcaggaaattcccaagaatcagtcacagaacaggattcgaaagactcgacctactcactttcgtcgaccttgacgctctccaaggccgactacgagaaacacaaggtgtatgcgtgtgaagtcacacatcaagggctttcatccccagtcacgaagtcattcaaccgcggtgaatgttgataa

SEQ ID NO: 415 - DNA, 648 bp, Artificial Sequence
  Description of Artificial Sequence: Synthetic polynucleotide
  P4M KAPPA LIGHT CHAIN
gatattcagatgacgcagtcaccgtccagcctttcggcctcgactggggaccgggtaaccattacatgtagagcgtcgcaaggtatctcctcctatttggcctggtatcagcagaaacccggaaaagctcccaagctgctgatctacgcaaagtcaacattgcagagcggagtccctagcaggttctcgggatcaggttcggggactgattttacgcttacaatctcgtcactgcagccggaggactttgcgacgtattactgccagcaatactggacgttcccgctgacatttggcggagggaccaaggtggaaatcaaacgtacggtcgcagctccttcggtattcatctttccgccctccgatgagcagctcaaatccggtacagcctcggtggtgtgcctgctgaataacttctatccccgggaggcgaaagtgcagtggaaagtggacaacgcgctccaatcaggaaattcccaagaatcagtcacagaacaggattcgaaagactcgacctactcactttcgtcgaccttgacgctctccaaggccgactacgagaaacacaaggtgtatgcgtgtgaagtcacacatcaagggctttcatccccagtcacgaagtcattcaaccgcggtgaatgttgataa

SEQ ID NO: 416 - DNA, 768 bp, Artificial Sequence
  Description of Artificial Sequence: Synthetic polynucleotide
  Anti-IGF-1R scFvs M76
gaggtccaacttctccagagcgggggagggttggtgcagccgggtgggtccctgcgcctttcgtgcgctgcctccggatttctcttcagctcatatcctatgcactgggtgcgccaggcaccagggaaaggccttgagtgggtcgggtcgatctcgccatccggtggagccacgccctacgcagatagcgtaaaagggcgattcaccatttcgcgggacaattcaaagaacaccctctaccttcagatgaactcgttgaggcccgaggacacagccgtgtactactgcgcgaaggatttctataacattctgacgggtaatgcgtttgataagtggggacagggtacttcggtcacggtgtcgtcagcctcgactggtggaggtgggtccggtgggggtggatcaggtggaggagggtcgggaggagggggatccgacatccagctcacacagtccccctcgtcgttgtcagcgagcctgggtgatcgggtaactatcacatgtagagcatcccagggcatttcatcctatttggcgtggtatcagcagaagcccgggaaagcgcctaagttgctgatctacgcgggatcgacgccgcaatcaggggtgccctcaagattttcggggtcggggagcggaacagaattcacactcacaatctcctcgctccaaccggaggactcagggacctattactgtcagcaatactggacttggccgctgacctttggagggggcacgaaggtcgaaatcaaaaggacgtgataa

SEQ ID NO: 417 - DNA, 768 bp, Artificial Sequence
  Description of Artificial Sequence: Synthetic polynucleotide
  Anti- ErbB3 scFvs P6L
gaggtgcagctcgtggagtcgggagggggactcgtccagcccgggagaagccttaggctctcgtgtgccgcctcggggtttacgttcgatgactatgccatgcattgggtcagacaggcaccaggaaaaggtcttgaatgggtgtccggaatctcatggaactccgggtcaacaggatacgctgattccgtaaaaggccgcttcaccatctccagagacaatgcgaagaactcattgtacctccagatgaactcactcagggcggaggacaccgcactgtactactgcgccagggacctcgggtacaaccagtggttggaggggtttgattattggggtcaggggaccttggtcacagtaagctccgccagcacagggggtggcggatccggaggcggtggcagcggaggaggtggatccgggggtggtgggtcgtcaagcgagctgactcaagatccggcggtgtcagtcgcgcttggacagacagtgcgcattacgtgccagggcgactcgcttcggagctactatgcgtcatggtatcaacagaagccgggtcaagcgcctgtgttggtcatctacgggaagaacaatcggccctcggggatccctgaccgattcagcggttcatcatccggtaatacggcatcgcttactattacgggagcacaggcggaagatgaagccgattactattgtatgtcgcgggaccacccggggaatcagtgggtgtttgggggaggaactaaagtaacggtattggggtgataa

1. A method for the treatment of a cancer in a human patient, the method comprising: administering an effective amount of a bispecific anti-IGF-1R and anti-ErbB3 antibody to the patient, the administration comprising administering to the patient a single loading dose of at least 10 mg/kg of the bispecific antibody followed at least three day intervals by administration of a maintenance dose of from 1 mg/kg to 60 mg/kg of the bispecific antibody.

2. The method of claim 1, wherein the loading dose is greater than the maintenance dose.

3. The method of claim 1, wherein the loading dose is from 12 mg/kg to 20 mg/kg, from 20 mg/kg to 40 mg/kg., or from 40 mg/kg to 60 mg/kg.

4. The method of claim 1, wherein the loading dose is about 12 mg/kg, 20 mg/kg, 40 mg/kg, or 60 mg/kg

5. The method of claim 1, wherein the maintenance dose is about 6 mg/kg, 12 mg/kg, 20 mg/kg, 30 mg/kg, 40 mg/kg, 50 mg/kg or 60 mg/kg.

6. The method of claim 1, wherein the at least three day intervals are intervals of every three days, every seven days, every fourteen days, or every twenty-one days.

7. The method of claim 1, wherein the cancer is refractory to sunitinib or sorafenib.

8. The method of claim 1, wherein the patient has a pancreatic cancer, renal cell carcinoma, hepatocellular carcinoma, Ewing's sarcoma, non-small cell lung cancer, gastrointestinal neuroendocrine cancer, estrogen receptor or progesterone receptor-positive locally advanced or metastatic breast cancer, triple negative metastatic breast cancer, ovarian cancer, colorectal cancer, endometrial cancer, or glioblastoma.

9. The method of claim 1, wherein the bispecific anti-IGF-1R and anti-ErbB3 antibody has an anti-IGF-1R module selected from the group consisting of SF, P4, M78, and M57.

10. The method of claim 1, wherein the bispecific anti-IGF-1R and anti-ErbB3 antibody has an anti-ErbB3 module selected from the group consisting of C8, P1, M1.3, M27, P6, and B69.

11. The method of claim 1, wherein the bispecific anti-IGF-1R and anti-ErbB3 antibody is P4-G1-M1.3 or P4-G1-C8.

12. (canceled)

13. The method of claim 1, further comprising co-administration of an effective amount of one or more anti-cancer agents, wherein the anti-cancer agent is a PI3K pathway inhibitor, an mTOR inhibitor, a MEK inhibitor, a multikinase inhibitor, a B-Raf inhibitor, a taxane, irinotecan, nanoliposomal irinotecan, an anti-endocrine therapy, an antihormonal therapy or an antimetabolite therapy.

14. (canceled)

15. The method of claim 13, wherein:
a) the mTOR inhibitor is a pan-mTOR inhibitor chosen from the group consisting of INK128, CC223, OSI207, AZD8055, AZD2014, and Palomid529;
b) the mTOR inhibitor is selected from the group consisting of everolimus, temsirolimus, sirolimus, and ridaforolimus;
c) the PI3K inhibitor is XL147 or BKM120;
d) the MEK inhibitor is GSK1120212, BAY 86-9766, or AZD6244;
e) the multikinase inhibitor is sorafenib or sunitinib;
f) the antimetabolite therapy is gemcitabine, capecitabine, cytarabine, or 5-fluorouracil;
g) the antihormonal therapy is tamoxifen, exemestane, letrozole or fulvestrant; or
h) the taxane is docetaxel, eribulin, cabazitaxel, nab-paclitaxel, or paclitaxel.

16-31. (canceled)

32. The method of claim 13, wherein co-administration of the additional anti-cancer agent or agents has an additive or superadditive effect on suppressing tumor growth, as compared to administration of the bispecific anti-IGF-1R and anti-ErbB3 antibody alone or the one or more additional anti-cancer agents alone, wherein the effect on suppressing tumor growth is measured in a mouse xenograft model using BxPC-3, Caki-1, SK-ES-1, A549, NCI/ADR-RES, BT-474-M3, DU145, or MCF7 cells.

33. A composition for use in the treatment of a cancer, or for the manufacture of a medicament for the treatment of cancer, said composition comprising a bispecific anti-IGF-1R and anti-ErbB3 antibody to be administered to a patient requiring treatment of a cancer, the administration comprising administering to the patient a single loading dose of at least 10 mg/kg of the bispecific antibody followed by administration of one or more maintenance doses given at intervals of at least three days, wherein the maintenance dose is between about 1 mg/kg to about 60 mg/kg of the bispecific antibody.

34. The composition of claim 30, wherein the maintenance dose is greater than the loading dose.

35. The composition of claim 30, wherein the maintenance dose is less than the loading dose.

36. The composition of claim 33, wherein the loading dose is from about 12 mg/kg to about 20 mg/kg, from about 20 mg/kg to about 40 mg/kg., or from about 40 mg/kg to about 60 mg/kg.

37. The composition of claim 33, wherein the loading dose is about 12 mg/kg, about 20 mg/kg, about 40 mg/kg or about 60 mg/kg

38. The composition of claim 33, wherein the maintenance dose is about 6 mg/kg, about 12 mg/kg, about 20 mg/kg, about 30 mg/kg, about 40 mg/kg, about 50 mg/kg or about 60 mg/kg.

39. The composition of claim 33, wherein the at least three day intervals are intervals of every three days, every fourteen days, or every twenty-one days.

40. The composition of claim 33, wherein the cancer is refractory to everolimus, antihormonal therapy, gemcitabine, sunitinib or sorafenib.

41. The composition of claim 33, wherein the patient has a pancreatic cancer, renal cell carcinoma, hepatocellular carcinoma, Ewing's sarcoma, non-small cell lung cancer, gastrointestinal neuroendocrine cancer, estrogen receptor-positive locally advanced or metastatic cancer, ovarian cancer, colorectal cancer, endometrial cancer, or glioblastoma.

42. The composition of claim 33, wherein the bispecific anti-IGF-1R and anti-ErbB3 antibody has an anti-IGF-1R module selected from the group consisting of SF, P4, M78, and M57.

43. The composition of claim 33, wherein the bispecific anti-IGF-1R and anti-ErbB3 antibody has an anti-ErbB3 module selected from the group consisting of C8, P1, M1.3, M27, P6, and B69.

44. The composition of claim 33, wherein the bispecific anti-IGF-1R and anti-ErbB3 antibody is P4-G1-M1.3 or P4-G1-C8.

45. (canceled)

46. The composition of claim 33, further comprising co-administration of an effective amount of one or more anti-cancer agents, wherein the anti-cancer agent is a PI3K pathway inhibitor, an mTOR inhibitor, a MEK inhibitor, a multikinase inhibitor a B-Raf inhibitor, irinotecan or nanoliposomal irinotecan, an anti-hormonal therapy, an anti-endocrine therapy, or an antimetabolite therapy.

47. (canceled)

48. The composition of claim 46, wherein:
a) the mTOR inhibitor is a pan-mTOR inhibitor chosen from the group consisting of INK128, CC223, OS1207, AZD8055, AZD2014, and Palomid529;
b) the mTOR inhibitor is selected from the group consisting of everolimus, temsirolimus, sirolimus, and ridaforolimus;
c) the PI3K inhibitor is XL147 or BKM120;
d) the MEK inhibitor is GSK1120212, BAY 86-9766, or AZD6244;
e) the multikinase inhibitor is sorafenib or sunitinib;
f) the antimetabolite therapy is gemcitabine, capecitabine, cytarabine, or 5-fluorouracil;
g) the antihormonal therapy is tamoxifen, exemestane, letrozole or fulvestrant; or
h) the taxane is docetaxel, eribulin, cabazitaxel, nab-paclitaxel, or paclitaxel.

49-64. (canceled)

65. The composition of claim 46, wherein co-administration of the additional anti-cancer agent or agents has an additive or superadditive effect on suppressing tumor growth, as compared to administration of the bispecific anti-IGF-1R and anti-ErbB3 antibody alone or the one or more additional anti-cancer agents alone, wherein the effect on suppressing tumor growth is measured in a mouse xenograft model using BxPC-3, Caki-1, SK-ES-1, A549, NCI/ADR-RES, BT-474, DU145, or MCF7 cells.

66. A kit comprising a therapeutically effective amount of a bispecific anti-IGF-1R and anti-ErbB3 antibody and a pharmaceutically-acceptable carrier and further comprising instructions to a practitioner, wherein the instructions comprise dosages and administration schedules for the bispecific anti-IGF-1R and anti-ErbB3 antibody.

67. The kit of claim 66, wherein the kit includes multiple packages each containing a single dose amount of the antibody.

68. The kit of claim 66, further comprising infusion devices for administration of the bispecific anti-IGF-1R and anti-ErbB3 antibody.

69. The kit of claim 66, further comprising an effective amount of at least one additional anti-cancer agent.
